United States Patent Application Publication US 2024/0268394 A1 - sequence listing, part 9

SEQ ID NO: 122 - DNA, 475617 bp, Pseudomonas nodulensis
  misc_feature (127568)..(127594): n is a, c, g, or t
  misc_feature (140056)..(140090): n is a, c, g, or t
  misc_feature (358703)..(358729): n is a, c, g, or t
caggtaccaccaacccgttcccgtggatgagcgaaatcatggacttgaagaaagagaaaaacttcttcgagacccgtgtgatcgagtaccagactggcggcgcgctgagctgggattgattcctaagccaagcaaccccatgaagccctgacgtgttcagggcttttttgtgcgcggtgaattgctacttcttgaagcacatcaggctgaccacctcgcccagaagggttcggatcgcaccaccaatgctgtagccttgtgccccaattgccatcagcgttgtcaccggtcgagtgaccgggatgccttcaccgaagggctttacgccaaagtcggaagattggcacgggagtagactcccgctgtcacacctgatgcacactcaataaatacccgataggaccgaggccaacccgtgaacccagacatgctcgaagccggccccgctgacgccaaagtactttccgtctttgacttcgacggcaccctgacccaccacgacagtttcgtgcccttcctcaagtttgcctttggccccggcgagttctacggccggatgctcaagctggcggtgccggggctgcgttttctggtgcggcagatcagccgggatgagttgaaggcgcagttgatccgcacctttatgaccggggtggagaaggcatgggtgcaacagaaagccgaggagtattgccagaagacctgggcgcggctgatgcggccgacaggggtgttatcggtggagcaggagttgggatccggggcggaggtcacgttgtgttcggcgtcgccggcattggtgttacagccgtttgccaatcggctggggatcaagctgatcggcacggagcttgaggtggtcgacggggtgttgaccggcaagctcaccgggaataactgccgatgcgagaacaaggtgctgcggcttgaggcggtgtacggggatttgggcgactatcggctgcgggcctggggcgatacgcgtggggatcgggagttgctggcggcggcgcaggatgcgcattttcggcattttcatgcgaagaagaagcgggctcggttgcagcgatgatgcgggtgggtggggttggcgggtagaccgagggtcgcgcactagcatggggtgccagtgcgcggatggcccattccgatcaatcgtcaccgctacccaattcttgatcttcaaatgtggatcgcaccgcttccacaacccgttcggctaggtgaatcacttccagctgcggataagctttcttcaatttccccgatacctgccagccattttcctttaacgaccgaatgactcggtttgcgtcctgatcaggcatttccagcacttcttttagccgttcctgggcgcgctgaaagatgaccaacacacgcgcttcatcagccatctctatacgaaccgtgtgcgccactacctgtgccgtatacaagacttgttcggtcaagtcggggtagcgccacgcgaattgcgcatcgtcgtagtcatcgaagaccagattgctgcgggttccgtcctcgtagactacaagttctccaaatcgataggagccagcgtagcgttgcatgaatggccgcgaaaatgcctccagcgtacgatcgtaacgcgcccggaaatcaatcgaacttgtgattgtggccgacactggcaagattacgccttcaggcaccgccttatcacggatcaaggtatcgttgatcagaaagcgatggatccgaccattgccgtctcgcatggggtggatatagacaaaagcaaaagcgattacagcggtccgggccagcggctcagcgccccgtgttgccaactcgaatgctttcaagccgtcgagcaattgcattagcacctcaaatggcggcgcaatgtagtgaacgatatcctcgcgcatagtggcctgccccacgaagaccggtgagtgccgcaagcccagccctagcgcctcttcccccaaaataccggcttgcaaggtgtgcaggctttcattactcaacggattctcgatgtgaccacagtacttggcgatcacgtgggcaaaccgctggatcctgtcggctttgtctgcctctctctcgatcaaaaagctggcacgcgactccttgaacgtcagccaactcgccgtgcgcatcaggatatcagcgccaaaggtctggttcagctcccccagtgctgcgcccagatcaaactgcaacgcttcttgcacggcttcggtgcgacggatcaagggggagaacgcaggtacgccgggaagattatcgttgatgcgccagcgccttatacgcaaaggctcaacgcgggtcaggtaatgctgtgatgaaacagcatcgacatagccgccattggtaacatctggtacatcaaggtgcagtccggttaaccactcgtacaggaatccggtgcggcgggcatattgaccaaaaggcgtttgccggcaccaggcttcgacgggctcagggccggctgcagcaaataggcgagcgaagaattcgaggtgaatttcttcgtacttgagcccgaactcgaaatgccctgcaaagtcgtccgagggttggtagctgagggggtacttacgctcgacatgtccattgctctcgtggctcatgcgggtcgtaccgattgccgattcgacgcgcagtggctgtgccagcgagatacggtagcggtcagcgagtgccttgaagcctacctgcatggtcgaatcccctaacgaaccctaaaaaacgataactattagggaatagtaggcgaaaacgataattttgtgagtacgaaaacgctaatgcgctcttaaatttgctaacaaatcagcaatttcatttgaaaacgataacaacctaaagggaagcgatccgaatgaatggggccgtcaggagaccgaggcgatcccttcgaagcctcgctggggctcgacagctcccacagttgatctctgtcgctcggggggacggtgtttggcttgagtgttatgtcgtggctttgaggtccacgcccaaggctgttgcgaaggcttttaccatcgggctgcgcggggcgctgtggcgcaggatcaggttgaacgcggtgctcaggtgaacctgttccgggcacagtgcgcgtaggcgcccttcccttaccaatggcgcggcgtagtgttccggcaggaagccgaggaagcggccggtgaggaccaggatcgcgacagcttccacttgtgaggccgaggcggactggctgtcgtagttgacgaagttggccttgtcgcggtggatcgcataccgatggttcaccacttcgtattggcgcaagacctcgggcgtgaggtcgtttgcgtcgaagagtgggtgtcctacggcacagtaggcgtgggccttttcttcatacagcgggaaataatcgaattcttcacgccgttgatacaccggcacgataccgacgatcagccgcccttcgaccacgccgcgttcaacttcgtccaattgcgaggcatgtaggcgcaatctaattttcggcgattcgctgtgcaatttccctagcgcggtaattagcggggaattaacgtcggacacggtgttatcaattacgcccacactaaggtcgccaataagctcgttttgcgccgaactaagcttgtcgcgaaaactgtctaccgaggtaaataactcgatggacgcctgatacaccaacttgccttcttcggtcaggccaaacccttctcggccccgggtgcacaggcgcatgccgatgcggatctcgaggtcggagatctgtttactgatggccgccaggcccacgttcagctcgttttgcgcggcgctgaagccgccggcttcgactacggccatgaacacgcgcagcaatttgaagtccagcccgctcagttgcaggggcggtcttgtgccgggtttgggtggcaggtttccagaagtggaaagtggggtttccataatacgcgttgacctcaagtgccatattcaacaggcttcaacccaatccttgaacatagccaggcggcgataatgaacataaacatccgcccttggcaaccttgaatacggcgcgtcagacgctggttcagtctagttgaaaacttatttttactgcctccgactcttctaaaaacaagcgtgaggaacatccatgtcccagcccaccgaccgcctttggggcgctcgtttcaagaccggcccatctgctgcattggccgcgttgtcgcgttgccctgagcgctatttccgcctgacgccctacgacctggccggctcccgcgcccatgcccgtgagttgcagcgcgcaggtctgctggatgagtcggagaccctgcgcaccctcgacgcgctggacggtattggtgcggacttcgccgccggcacgctgcatccgaccctggatgacgaggacgtgcacacctttatcgaacgcgtattgactgaacgcctcggcgccctgggcggcaagctgcgtgccgggcgttcgcgtaatgatcaaaccgccaatgacctgcgccttttcctacgcgaccatgcgcgcaccatcaccaccgaggtgttgggtttgcagcaggcgttggtggaacaggccgagcaacatgtggaaagcatctgtcctgggttcacccacttgcagcaggcgcaaccgattgtgttcgcccaccacttgctggctcacgcccagtcgatgttgcgcgatgtgcaacgcctggtggattgggatacgcgtacggcgttgtcgcctttgggggcagcagcgatggccggttcggcgattgcacgccagcctgagcattcggccaaggaaatgggctacaccgggccgtgcgaaaactccatcgacgctgtcgccagccgtgaccatgtggcggagttcctgtttgtggcgggcatgctcggggtgaatatttcgcgcctgtccgaagagttttgcctgtggtcttcgcggcagtttcgctgggtggtgctggacgatgcctacgccactggcagctcgatcatgccgcagaagaagaacccggatattgccgagttggcgcggggcaaggctgggcgcttgattggcaacctgaccgggttgatgtcgacgctcaagtcattgccgctgtcgtacaaccgcgatttgagtgaagacaagcacagcgtgttggacagtgtggacaccttgctgctggtgctgccggcgatggccgggatggttgcgaccatgaaggtgcaggtggaagagcttaggcgtcaggcgccgatggggttcaccttggcaacggaagtggcggattggttggccactcgcggcgtgccgttcaaggaggcgcatgagattaccggcgccttggtgcaggcctgtgagaagcatgagattgaactgtgggaagcctcgccggcgatgttggcggaggtggacgcgcggttgacgccggaggtgcgcgattgcctgaccctggaagcggcgattgcagcgcgcagtgggtggggtgggacggcgccggagcgggttcgggagcagattgggcggttgaaagcggccttggccgaacagcaacagtggacagagagttaccagggatttcggatttaagcctgcaaccccgtggtgtctggtccggcgctttcgcaggcaagccagctcccacattggaccgagtacatcagtaccagcgtcatcagtttttggagagtcaccatgagccaaaccccggccgagcgcttggcagccgagcgcaagttgtccgaaaaccagttcgatatcacccagtacgagcacgtaccgcgtcgatattacgggcggatgttttttgccacgttgatcgtgatcgtgttggccgcgctgttgcgtgccttcgccaacggtcagatcgaatggtcctacatcgggcagttcctcacgtctgaggccatcctctggggcctggtcaacaccatcgtcatgtcgatcctggccatggcgctgggcgtggtgatcggggtgatcacggcaatcatgcgcatgtcggccaacccgatcctgcgctatgtggccatcacctacacttggctgttccgcggcacgccgttgatcctgcaactgctgctgtggttcaacctggcgctgatcttcccggtgatcgcgattccaggcctgttcagtatcgacactgtcgacctgatgacgccgttcgtggccgccctgctgggcctgagtatcaaccagggtgcctacaccgccgaagtggtgcgcgccggtttgctctcggtcgacaccggccagtacgaagccgccaagtccataggcatgccgagcctgcaagcgttgcgtagggtgattctgccgcaggcgatgcgggtgatcattccgcctgtaggcaacgagttcatcagcatggtgaaaatgaccagcctggccagcgtgatccagtactcggagctgctgcacaacgcgcaaaacatctactacgccaacgcccgggtcatggagctgctgattgtggccggcatctggtacctggcggtggtgactgttctttcatttggccaaagccgccttgagcgccgctttgcccgcggcgccggcaagcgttcgtaagtctgggttgaggagatttgccccatgagaagcatcgtcaaggccgtcaacctgaacaagtattacgaccagtatcacgcgctgcgcgatatcaatatcgaggtcgagcaaggcgaagtgatgtgcatcatcggcccgtccggctcgggtaaaagtaccctgctgcgctgcgtcaaccagttggaaaaaatcgataagggcggtctgtgggtcgacggcgaactggtgggttaccgggtcgtcggcaacaagctgcatgagatgaacgaatcgcagattgcccgccagcggttggccaccggcatggtgttccagcgcttcaatttgttcccgcacatgaccgtgttgcaaaacatcatcgaaggcccgtgccaggtgctcaagcgctcgcccaaggaagccaccgaggatgccctggagttgctggcccgcgtcggcctggcggacaaacgcaatgcctatccggtggagttgtccggcggccagcaacaacgcgtggcgattgcccgtgcactggcgatgcgccccaagctgatgctgtttgacgaacccacgtcagccctcgacccggagctggtaggagaagtgctgtcggtgatgcgcgatttggccaccaccggcatgaccatgatcgtggtcacccatgagttgggcttcgcccgcgaagtctccaaccgcatggtgtttatggatgccggccagattgtggaagccggcagccccgaagaaattctaataagcccacaaaacccgcgtacccaaagctttatttctgccgttcgcacttaactaaaaaacaaacgagaacgcccccatgaagaaaatgtttatccccacgttgctcgcaggcctgatggcctcttccgttgttttcgcggcattgccggcggcaatcaaggacaagggtgagatcagcgcggccatcgtgccgaactacccgccgatggacttcaaggacccggccaccaacaagatcaccggcctggatttcgacttgggcaacgccctcgccgagcgcctgggcgtgaagatcaagtggcaggaaaccggcttcgagcagatgctcagtggcctgaccaccaagcgcgtggacatcgtgctgtcgggcatgaccgacaccgccgagcgccaaaaggcggtgacctttatcgactacttcaccagcggcccgcagctgtacaccctggccaagcgtgaagacctcaaggaattgactgacctgtgcggtaaaaaagtcggcaccagccgtcgcaccacctggccgtcggaaattgccgcgtggagcaaggaaaactgcgaagccgccggtaagccggcgatcgtggtgatcggcactgagggctcggcggatgcgcgggcgcagttgcagcagaaccgcctggacgctgcgatgcagggcagcgagaccattccttatttgatgtcgttggacaagggcaagtacaagccggtggggttggcgatttccaagcagttcaccggacttgggattgagaagagcaatacggagttggtcacggcgatcagtgaagcgttgcaaggcatgatcgatgacggcacctacggcaagatcctgaagaagtgggacctggagcaaggtgcggtagagaagatcaccatcaactccggccaataactcgatctgaacaatgtgggagggggcttgctcccaatagcggtctatcagccaagcatctggtgactgagccaccgccatcgggggcaagccccctcccaccctggattttcgttgtccacaaaataacaaggacacccgccccaccgtggccacctactccctggtaatccgccgcctgatgatttgctcgctgaccatcgtggtcagccgcgccatgaccagcccgttgctggccctgttgctgagtacccgcctgggcctgaaccagcaggacatcggcttgctgatgggcatcgcggtgtttatcgcgacattgctgggcctgtacggtggctacatcatcgaccgcctggaaaagcgcaagctgctgatcctggccatgctctccagctccatcggttttctattgctgacctttgccagcaacctctacctcaccaccctgaccctggtcatcaccgaagcggcgtcggcgctgttcctgattggctcaaaagccatcatcagcgagaacctgccggtgggcgagcgtgccaaggtgttttccctgcgctacacactgaccaacgtcggctacgccacaggcccgatggtcggcgtcgtgattgccggccacatgcaactggcaccgttcctgatcgccagtgcgatcgcctttggcagcctgttcctgatgattggcatcccgcccacccaacgggatgacagcaacaagcccttgagtttcctcaccaccctgcgcaccttgcgcaacgaccgcacactgattctgttcaccagcggcagcctgctgagcaccattgtccacgggcgctataccttgtatctgtcgcagtttttgctggtagcctacaaacccgccgaggcgctgaagattctgtctgcggtactggcctgcaatgccatcactgtgattttgatgcagtaccagatcggccgtttcctcaaacgtgagcaactgcgctattggatcgtgctaggtacgttgctgttcatgaccgggcttgtcggtttcagcctcgcagacagcctggtcacctggtgcatggcaatgttcgtgttcacactgggcgagatgatcatctacccctccgagttcctgtttatcgacaccatcgcacctgatgcactgcgcggcagttactacggtgcacagaacctggcggcattcggcggggcaatgagcccggtgatttgcggctatctgctgatcaatgccacgccggccagcatgttctatgcgttgggggcactgactgcggtagggggcaccttgtgtttcttgagtgggcgacgggtagcaggttcttgctgatatttacccaggatcccgctattaatagcgaaacctctcacggacccgagccccatgaaattcgatacggcctacagcctgagtctcgatgacaagctgtcgatctacgacgtacgagacctgaatttcgacgagaccgccgacttcgactccgacaaggaccgtttcctgtgccccaacgatgagtgccgggcagcgtttgatcccggcaataccctgagcaccttcaacgctaaaaacgtcaattacctgcgtacgccgcacttcaagaacaagaccggcacccggcatatcgacggctgccgctacgccagcacgcacaagagcgcagccggcgaaagcgacgacgagcgcgaggacaatttcccatcggaattagtgctcacccgccgtcagtacgagcgcaagaccccgctggcaggctccgaaggaaacatcccacaagagccaacaaagactccctcaaaccgcagctccatttcccacaacgccagcgacaccacaccggacaaaaccagcgtgttcgcccacccggtggaatgctacgtgtccaatatcgacgacaaggacaagctcaagtccatgccgttgaagatcggcgatcacaccgccacctactggacgttcttcaagaagatcgaatacctgcaggacaacaagggcctgatctactggggcaggatcaaagaaatcaaggactacaccagcagctttcgcatcgacttcgaaaagaaggtgtggctcgacaagaagccctactcggtcaatgtctacctgagcaagaaactcatcgagaactaccgcaagcgcaaggcgttcctggagcagatcaaggcggcggtggacagtgagcgggcgttgtactgcttcttctatggggtgacgccggaactgaaacaggtgccgagcaagaaaaaccccgagcagacgttcggggtgttcagcgcgaatatcgagaacctggatcacctgatcattcgggaggcgccgggggtggaatagtgcgcatcagcggcaggacgctttgtatgcccgatagatttcgcgtgtttgttgagccttggcgacacctacgcccccgaaggctaccaaccagtggatcagcatttcctcatcaggaaacacataggtgttttgccctttgaatcctctgggtgttcgattgattcctgcgtcgtagcgcaatggactccaaggctgcgttacaaaatcaaaatcctcggcatcccatttaaagaaccgcagtacttcattaagggtagtctggccactgcgatcgccacgttggacgaggcaataggcttgattagccaacatctgctccagcacctgaggatcgacccaatccagcactgcgcatttcaacgcattatctagaataccggccgtccaacgctcgaaaaacacctggaaaaatcgttcgctatcagcttttttcatatcgaaaaagagcatgcagtaacgggttttaagatgcataaccactaccacatgcttgcgtttaactgtcgcagcatgcaccagccactgatgggggtcgctgtgaagatcatagctctcgacaggcagagcaggccgtagaacgggtgtatgctttttgcctttgtgtactcggctgaaaaactcacaggcagcttgtgagcaattgaacgtcagcattgcagttgctccttcattttacttcccacgccagcaacgaaccgtccaggtttgtgatgaagggatatccacccattcaatgtcataaggttgtcgagcggcatacctaatcgcatccagcgcctctccagtgagaactgccaactcggaatccgtcggcaagtcacgcgtgaccatcacagccaggccactgagtcggttcttcaaatgcagcttttttgtacctgtcatcgccatcgtctggcaaatagactactgccagggcgcaggaaatcgaacaaggccatgtcataaaaaaccagttgatgagcggtcaaaacaactgtacaaaaacacagtatattttgtcctcccccgtcaaaccctggagataccccatgtcctctctggcaatgagctctttcgtagaacagcagatcgtcctgcatcaattcaccgccaagcacagcgtacaggcgcgcgcgatgctgggctggagccgggaacgcctggcacaccaggctggcgtggcggttgaagccgttcagcagtttgaatgtcaatgcgacgtggatgacgaaacccgcctggccctggcctttcggctggaagctgaaggcctggtgtttttcccggggtttgcgccggggtgggggatgagtacacgccgctttgacaccgccacaaccgaacacgcagcgcaagggatcatctctcgcttgatcggcgcaacttcgtcatcacttgactcacccactgctcaagccaatggtgcatagcggccagccgtaccaccttgctggccagcgcctggacggggtcccatgcactcccctctcaaccgcgaaacgtcaggcctgcagttgcaatgcctgacacgtcatttgcggcgtcagagcaccggcttgatttgagcacgggctgcctgctcatacccatgggccacggccagcaaggtgggttcggaccactgggtcccgaaaaaataggcactggttggtagcccattctcatccttacccgcagggacagcgatgcctgggtagccggctgctgctaccccaaaatagtcgttagtctcaaaatccgacaccatggcgtccagaccctccgatttgatcgggtcgtcaatggtagcgcgaaagtctcggatgagctcatcccaaaagggtttgctctgctcaggcgtcatggtttgggcattgatttggttgaggactgtctggtgatccacctccgcgccatcacgtttaatgttgaacagggtcagatcaggcagtgaatcgactggcaaccctgaacgcttgcccacataagtattcaattcattctttacgtccgagaacaacaaatctacccaacgcgaatcatcggccaggcgcatctcgaccggcactacttccgcgccttgctcacgaagcacggcaagtatccggcggaatgacgcactgtccttagtgggtgtgggttcgccagtttcagaaaacgttgcgggatagccgatacgcttgcctttcaacgcgcctggaaccagtaatttcgtgtaatcgataccttggggcgctccctggctcgccggatccttgggatcgctgcccgacatggcattgagcatcagcgccacatcaaataccgaacgcgccatcgggccaggagtgtcctggtggtgacttgcaggaataattccattacggtccagcaagccaacgctgggcttgagcccgacaaccccattgcgcgctgctggcacaataatcgaaccactggtttcagttcccaccgccaagggcgccaaccccgccgcaacggcgacggcagacccggaactggaacccccgacgtcggcatccgcaccatgtgggttacgggtttgtccccccctgctgctccagccatcaggaccaccacgaaaccctgccagttcggtcatattggttttaccgaggatcaccgcgccctgcttgatcaggtagtcgaccaatggggcgttcttgccgacaggtgcccccaccaggccaaaagcacctgcactggtttgcatgccttcagtttcgatggtgtccttgagcaaaacaggaatgccatgcaggaggccacgcacgttgccgctggctcgttcacggtccagttcgcgtgcggtttcaagtgccttggggttgagttcgatgatggacttcagtttcgggtcgaccctgcgaatccgctcatgcaggtacgtgaccaagtcggctgaaccgaacctgccttgggccatttgcgcgccaagctcattgacattgaggtattcggtccccggagggactgcctttgaaacaacaggtgagtggccgtctgcaaaagactgaacaaactgccggacgatggagcccattccatatgcgataccgatcataaaacctctcgaggagtaagaaatgacgaaggaccaacgttgatccgtgggccagtctaaaaactcttctcctgccggacagcgcgacgcgtgcggttcactgtgtgggatagttcaacgcaacgggtagccttccaaggggtccatcaaacgacgggagcttcgatactcgcacaccatggccaccaaccactccttcgcccatcgtgcgccgtagaaccaaagtgtcgcgccatcctcgagcggctcacccagccccgggtaaccactccagcaagccccatggaaggcggtactgcggctgtcggataccaaggcatccagtcgatactcatgcacaagctcatcgatttcattgcgaacatgcagggtgtcgatacggtgcgcatgcaccggtaccagtacggcgccggaccgaagcaggatgtccagcgctttcaggaaggaggtgcggtgctcaatcaactgatgttcatgcccctccacaaaccgctcggcaaatcccaggcgcctgccctgcaacgcactggcggcggtaaaggtcgtgttgttctgcaccaggggcacttccaccatcaccggccccgagggttcaataccactcaatgcgatcaatgacagcgacgggtcacgcgagggttttagagggagtcccggggcgtcataccccgggaccgggacgcttttccccaaggcgccatgagcttggggatcagcaccgaaagcgataccacgcgagcttgtatgctcttgggctatcgttgcctggccagacgaatcagtgagcgcagacacccgctgccctgtcggacaaggcaaccccgcctgccaatatttcttgcacgtgctctccataaaagacgtcccccgacacataaattttcggggatcatcgcaccgttgcctggcgcctgtcgcagctctgaaacagcttgaaaactcctttttccatagcctcctccgtcagcctgcgaggtgttcctgcgcaccctgggcttccacctccagccaccacgcaaccccacgctcaggctgattcaagctgaacgcctgccccatctgcggcgtagtgatggacacgttgcgctcccaggccagggccatgatgcggtcgaacggctcgtgccaggcatggaacgccaggtcgaaagtgccgttgtgaatcggcagcaaccagcggcccttgaggtcgatatgcgcttgcagggtttgctctggctgcatatgcacgtgaggccaatcgacgttgtaagcacctgtttccatcagcgtcagatcgaacggaccgtactgctcgccgatgcgtttaaaaccgtcgaagtaacctgtgtcaccgctgaagaaaattcgccgaggaccatcgatcatcacccaggaacaccacagggtctggttcgcatcaaataggccacgcccggaaaaatgttgcgcaggggtggcgacaaaccgaatgccatccacttcggtgccctgccaccaatccagttggcgtaccttgctggaatccacgccccacttgaccaggatgtcgcccacgcccagcggcgcaagaaaataacggaccttgtcggccaattggacgacagctttgcggtccaggtggtcgtagtggttgtgggaaagaatcaccgcctccaggggcggcaactcttcaaggctgatcggtggctgatggaagcgcttggggccggcccaactgaacggtgaggcgcgctcggcaaataccgggtcggttacccagaatttaccgcgcattttcagcaacacggtggaatgtccaaggcggaacacgctgtgatccggggccgccagcaattgctcgcgagtcagtggttgtaccgggatctgccccaccggccgcgtgctgcgtggtttgttgaacaacatgttccagaaaatgcgcaaggttttgccgaagccaccgtgctgcacgggggtgtcgttgctgaagtgcccttggccttgcttgggcgctgctggcgaagaatcgacgcgggacgagatcgtggccatttccgggtgactcctacggatcgcttataaattacactgcacagtgtagtttcaagattgcaacaaaatccggagcaagtaaactaccgagtgtaattttcctccaagagccgagcgccacccatgactgcacctcaacgcctcaccgaccgtaaacgcgaagccattgtggctgcggccatcgccgaatttcgcgcaaacggtttcgaggtcaccagcatggacaagatcgccgccaccgccggcgtatccaagcgcaccgtgtacaaccacttccccagcaaagaagaactgttcgctgaaattcttcatcaactctgggccagcagcgtcgcccaacttgacgtcagctacaccagcgaccgcccgttgcgcgaacaactgcgcgggctgctggaggcgaagatgaagatgatgtcggacgccaatttcctcgacctcgctcgcgtcgccatcgccgccaccatccattcgccggagcgtgcgcaagacatggtcacccgcctgagccagcgcgaagaaggcttcacccaatgggttcgcgccgcccaggctgacggccggctcaactgctcagaccccgccttcgccgcccaccagatccagagcctgctcaaggccttcgccttctggccacaaatcaccctcggccaacccactctggatgcagcccaccaggccagtgtgatcgagtcggccatcgacctgttcctcgccggctacgaagtcaccgccccccgccaaccgtaaaaaacctgttgtgtgagcgacattccaggtcgtttttgacgcattcgccctccgttttgcgcaaatggcctggaaggacactgattattcccacgcgaataactgacaatattcacagtcattatccgatcaacggttgatccagcgaacgcgcgccaccgtatctgtaaaaaacagctgcccccaggaatttatggaaaacagacaaggcaaagggctttcatttgccaagcgtatctacaaaccaaggatcatcggccttgccatcggttgcatcagtgtcagcggcgccctttaccccctcgccatgccaggctgggtgtgggcactcctgctgttcaacgggtttgcctgggcgcatgtggcgtatcaactgtcgacccgctcgcaatacccctaccaggccgaacaacgcaacctgctgtatgactcgctgctcggcggcttctgggccgctgccacgcagttcacgccactgacggcagtgaccatcctgtcgatgatgaccatgaataacgtggccgccggcggcaagcgcctgttcctgcgtggcctgtgcgcacaagggctcggaatcggcgtagccggggcgctgttcggtatccggttcaaccctgatgtcagcctgctgcaggtctacacctgcctgccgatgctgacgctctatcccatggccatcggcatggtctgctatcaactggcaatcaaactgtccgaacacaagcgcgccctgagcgccctgagccgcaccgacagcctcaccgggctgctcaatcacggttcctggaaggacctgctgcacctcaagttccacaagtgccagcaacagcaaagccacgccaccattgccttgatcgacatcgaccacttcaagcagatcaacgacacccacggccatattgtcggcgatgcggtactgcggcagttgagcctggagttgcggcgcaacctgcgggaaaacgacctggccggacgttacgggggcgatgagttctgtgtgattcttccgcaaatgccgctggaacaggccgcccggatcatggagcgcatgcgcgaaaccttcagcaattaccgcaacccgcagatccccgaattgcgggtcagcctgagcatcggcctggccgacttccaacccttctttagcgatgccgcgatgtggctgaatgcagcggatcgcgcgctgtacgccgccaaggacaccgggcgcaaccgggtcaatgtcagcgacaaagtgatcgcccattccgcctaaagtcgtcctacgactactcgtccgaatcttccagcctgccagccagaagaaagcataatgccaccactggtcgcctacccaaaaaaggtcctccctcaagggcgaacttcctgccaggctgaccactctgaacccgttgtcccaccccctctgtcagcacaaggaagctggcaatgagcaagtcaaccgtagggcatataccttacgggggcaggcgcatatccaaggaaactccagagtctgcttgcccgagcaccgcacatgctattcaacacgcataaaagaacgatcaacaccctgcaacacaccgtcgcccaacaggccagcctgctggacgctatcgagcgctccatggcggtgatcgaattcgacctgtccggcaatgtgctgcgggccaatgccaatttcctccagaccatgggttaccgcgccgagcaggtcgagggccagccccatcgaatgttctgtaccccgggctacacccgcagccctgagtacaaccagctgtggtcaaatctgcgcaatggccactcccagtcaggcacctttgaacgggtagccggcgatggtcagtcggtgtggctggaagccagctacaacccggtgcgtgatgacgcgggccaggtgaccaaagtggtgaagtacgcgatggatgtgaccccgcgcctgcaagccgaaagcgaagccaatgccaaactggacgccatcggtcgtgccatggcggtgatcgagttcaacctcgacggcaccatcatcaccgccaacgccaacttcctgcagcgcatgggttataccctggcgcagatccagggccagcatcaccgaatgttctgcagcgcggcgctggccagcagcccgacctacagcgacttctggaaacgcctgaaccagggagaactgttcagcggccagttcgagcgggtggataaaaacggccaggtcgtgtggctcgaagccaactacaacccggtgtacgacgccagcgggcggctgtgcaaagtggtgaagttcgccacggacatcaccgcccgtgtgcaacagcatgcggcggacgcgcagagtgcggcccaggcctatcacctgtccctgagcacccaggacatggcagagaaaggtgccgaggtgatccagaaaaccgccaatggcatgcgcgaaatttctgcggacatcgacgattcctcacaactgatcgccaagctcggtgatcgctcgcaacagatcactgccatcgttaacaccattcgcggtatcgccgaccagaccaacctgctggccctcaacgccgccatcgaggcagcacgtgcgggcgaacaaggccgtggtttcgccgtggtggccgacgaagtccggcaactggcggcacgcaccagcggctccaccacggagatttccagcatgatcgcgatgattcaggctgaaacccgacaagccatcgacagcatggacgccacccgcgaccgtgctgcccaaggggttgaaatggccaaccaggccggcacggtgatcctgcagattcgccaaggcaccagtgaagcggtgcaggcggtgagtgcgttcgccaacgagcggggcggcaactgacccgatcttcatacggagtgccgggggctcggtctatagtgctggttgttcttcaagcatgagatccgagcccgccatgaccccagaaaagcccgaagccacccccgtcgaccacctgcgcttccaccgcccccacgcccacctggcaccgaccttcggcaacgacacctttgccctcaaggccgaagccttcgcacgcttcttcggtacgccgaccttcctcggcgcacaaaccgccatcgtggtgttgtgggtggtactgaacatgaccggcatcacgcatttcgacgtgtacccgttcatcctgctcaacctggcgttcagcctgcaatcggcctacgccgcgcccctgatcctgctggcccagacccgccaggccgcccgcgacaaggcgcagtccgacgcggatgcgcagcaccgcgaagccctggcgattgccaacaccgagcgccaggcccaggcggcgcagaccaccaagcagttgctggaactgctggaacagaacacccggctcacggaaatgaccaaacaactgactgagcacattgaaagcctgacctgcgaaatgcatgagcactttgtgcgaaaaacctaaggcagtcgcacatgccgtcccagctcatcgaatagggtcaccaccgagcgcaacgctcggcagtccgggcgcgtgagcaaccacaacgcggtgtcatgccctgccaacgcagggcccagcgattgcaggccgtcgcccaatagaaagtccggcaaggccgccacgcccaaaccggcccgtaccagttcggtgaccgataacatgctgttgcagcgataactggggcgcacaccgggcagctgctcgcgacgccaggcgaccgtggggtggtcgggcaggaagtcatccggggcgacccaaggcaggtcggccaactcacggcccgcgtgctgacgggcaaaatccgcgctggcgcacacctgataagccacattgcccaggcgtcgacccaccagatgctccgggggcgtgcgggtcaggcgcagggcgatatccgcgtcacggcggctgaggttggcgaagtcattcgaggtactcagctccagggtcagtgccgggtagtgcggcatgaactgcgccagggccggcaacagcaaaccttgcaacaccgagtcggtacaggtcaggcgcaccgtaccgctgatcacctcaccgccctgctccacaccaatgcgcgctgcttccagggcctgttcggcacgctcggcctgttgcgccaggttgctcgccaggctggtgggcaggtagccggcacggcttttttcaaacaacgtctggcccagcgccgcctccaggcgtcgcaccgcgcggaacaccgtagacacatccacccgcaataacgccgccgcccgtgcgagcgtgccgccacgcaccagggcgaggatcagcgataaatcagggtaatccagtgaatagtgcgtagctgcattgagcatgtgggtaaacgccaatattgattgcgcgaacgccaatctatagtgcgccccaggacaccacaagccatgggatgtacaggatgaaaaccacaccgctgcacctcgccctgatcggcgattacaaccccgctgtcatcgcccaccaagccatccccgtggccgtgcaacaggccgccgaaatcctggggctgagcgtccatgtccagtggctcgacaccgctgccctgccccagtcactccacgctttcgatggtttctggtgcgtccccgccagcccctaccgcgacaccgatggcgcactgcgggcgatccgttttgcccgcgagcaacgccgacctttcctcggcacctgcggcggttttcagcacgcggtgctggaatatgcgcgcaacgtgctgggctggaaggatgccgagcacggcgaactcgcgccgcacgccaagcgcgccgtgatcgcgccactgagctgtgcgctggtggaagccaccgacaccgtgcgcctggtgccgtacacgcgcatcgccgaggcctacgacacccttgatctgcaggagggctatcgttgccgctacggtgtgaaccccgagtttctcgatgccctgctggaaggcaacctgatccccagcggccatgactcggcaggcgatctgcgggccgtggaattgctcgaccacccgttcttcgtcgccacgctgttccaacccgaacgcgctgcgctaaagggtattacgccgcccttggcaattgccttgctcaaggcttgccaggcagtgtcggcatgatcgcccgcacacccgccccgccctactacgcggtgattttcagttcactgcgcaccgagggcgaccagggttacagccaggccgccaaccgcatgctcgaactggcgcgcggacaaccgggatttctcggcgtggaatcagcacgggaagacgggttgggcattaccgtgtcgtattgggacagtgaggcggcgatcctggcctggaagcagcaggccgagcaccgggcggtacgcgaacaggggcgcaccacttggtactcggcgttccagacacgggtgtgcaaagtcgaacgggcgtacgccttcgaaagcggttgagcctttgggttgagagtgcctgatgatgaactggcttgcaggtgatgagcagggttgtttgtggttaacaggcttgttgtggcgagcaggcttgtttgtggcgagcaggcctgctcgccacagggttagctcaccaggctgcgcaacgcactgatctgcggaatctccacccgccgcatatacacccgcaacggctcggtgatgttgatacggtcgtcgatgttctggtccagcagcaactggatgcgctcgcgggacagggtcatggtctgttccggggccggcagccagacgaattcggcagtgggaatgatgccgtcatcggccacgtccatgccgaaggagtcttcgctgaaacgcacgatgtactggccggtcttgcggttgaggccaacaaacccgtggagttggtcggcggcctggcagataagctcggaggtgatgcgcatggtaaacctcactgaaaagtcccacagggactggaaagatggtttacacgcgtggcacaaagtaccgccctctaacggagcagcttcgggcaagagtactgcaatgcctgcaaaaaaaactcagaaaattgaggcgtgagcacgttaatgtcggtttggtgatagcgcctttcgcaatcaattgttaaaaaggaggccttctcaaagctacctccacgaaaggacttcgcatatgcctgtcacgtttaccaagagtgccttgctgctcgccctgatgctcggccttggccaggcacaggctgccgacccgatcagcccggctgaattggcaaccaacgaaggcattccgtaccccgccgtgatcgcccaccgtggcgcttcctacgacgctcccgaatccaccgccgcggcctacaaaattgcccgcgacctgggtgccgactacctggaaatggacctgcagcgcagcaaggacggcgtgctgttcgccctgcacgacaacaacctgcagcgcaccaccgacgtggctaccaagttccccgaccgcaaggacgccccggccaacgagttcacctggaaagagctgcaaaccctcgacgccggcagctggttcaacgccgcctacccggatcgcgcgcgtccaggtttcgttggcctgaaaatccagagcctggacgacatcatcaagatcgccgaaggcaacccgcagcacaaacccggcctgtacatcgaaaccaaggagcccaagcaattcccgggcatcgaagccgacctgaaaaacaagctgctggacaaaggctggctgagctccgccggttccaaactgggcaagagcaacaccggtgtcggccagggcaagggccgcgtcgtgctgcaaactttcgaggttgccagcctcaaagagctgcagaaagaaatgcccaacaccccgaagatcctgctgttgtgggtgggtgaaggcagcatcgagccgaaaaacaagcagacgttcgctgagtccggcgaaaccaccaaggccgcctactacgccaagcaggaaccgaaggatgccgccgagttcgaaaaatgggtcgacgaagccaagagcctcggcgccatcggcaccggcccatcggctgagctgaccaaccacggcgaccagagctattcggacctggtcaaaccggaaatgaacaaactgacccacgacaagggcctgctggtgcacgtctacaccgtcgatgagccggtggacttcgacaaagtgatgaaggccggcgtcgatggcatcttcaccaaccgcgccgccgaactgctgaagttctacaagcgctggccgtcgtccagcgtgcaggatctgctgaacgactataagtactgagtggtcagtgtgccattaaggatgagttaagttgcgccggttaatctggcgccacttaaacagctcaccgaagaaggacacacaccatgaaaaccttgaccgctctgttcgccgctaccgccctgaccctgaccgccggcctggcccaggcggatgttcgcccggaccacattgaaggcctgctcaagtccggcgccgtgatgcctttcgaaaaactcaacgcggctgccctggccaaacatgcaggcgccaccatcaatgacaccgagctggaccacaacaacagtggtgtgctggtctacgaagtcgaactgaccgacaccgctggcaagaagtttgaagtgaagctcgacgccaagactggcgccgtgctggaagacaagctcgatacttgatttgaactaaaaaaaagccacccttgggtggcttttttttgcctgatcaggcgctaagacgcgccgtcacctcattcaactcactcgacaacccacgcaggtcatggctcgccgcttcggtgcgcttcacgttgtcgaggttggccgtcgccaccgtggtgatctgcgtgatgttgcgcgagatgtcctcggccaccgaagtctgctcctccgcggccgtggcaatctgacggttcatgtcgcgaatcgcctccaccgcctgagtgatgtgagccagcatggcgccggcttgcgtgaccttctccacactctcatcgctgcacgactggccgctcacaatcgcttcagccgcgtccaccgcaccggtctgcaccgcctcgataatcccgttgatctcgatgatcgacgccgccgtgcgttgcgccaggctgcgcacctcatcagccaccaccgcaaagccccgtcctgcttcgcctgcgcgcgcggcctcaatcgccgcgttgagcgccagcaaattggtctgctcggcgatgccgcgaatcacttccagcactttgccgatgcgtacgctgtcggtttccaggcggcggatgatcgtgccggtgttgaggatttcgttgcgcatctggccgatggtggcgatggtgactctcatcacctcaccgccttcgcgggccgaatggtccgcctcgtcggccgcacgggaagcactggcggcatgacgcgcgacttcctgggcggtggcggacatttcggtcatggccgtggccacttggtcggtgcggttgaattgatcgtgggtgcccgtggccatctgcccggcgatggcgttcaactcgccgctggcgccgaccaggtcgctggcgctgcgctgcaagcggctgaaggtttcggcaagaaagtcgcgcaaggtatttgcggcggcggccaagtgacccaactcatcctggcgacggctggctacgcgctcggcgaaccgaccgtggctcagttgcgtcacgtagtcgatcaggctgcggatcggcaggatcaggttgcggttgatcaaccacaggctgaacaagccgatcagcacaccggacagcaacatgatcgccaaccccaccagcacggtgcgctcagcgtaggcgctgatggccttggattgctggctgccttgttcgcgcaggtcactgaccagcgcactcatttgctcgctggccgcgcggtccacgcccttcaccgccatatcgcccgcagtggcatcgccccccgccgccacgtaggcatcgcggcctttctggtaagccacaccgagttgctcgtgcgtctgacgcagggtttcgatgcgtcggctcaggctcgggtcgctgccggtctgggtgaccagccgagtgagaatgccctgcacatcgcgctgacgctcctggaactggccccagtatttctccatgtcctgaggctgcttgccgcgcaacaggacgtttttccattcctgcacctgcaccttgaattgcaggttggcctcgtcgatcaactgtgaggtcagcaacggcccatcgatcaaacttcgatagctcagcaccccattggacaggaagttgaaacaggccagggcgatcaacagcatcgccaacaggctgccaccgagcagcgacaggatttgtgctctcaaggaggttcgcaaaacattcatcggggaaaagcctcgatacaaggaagtggtgcatacacacggcgacttccctgtcatcaaaagcaccgccgatccacagcggttcttaacaccttgaatcggccgggccagaggcctcttgaacaactcctgacaggcggtcaaataaatgtcaccgcaacgaaataaatccaaaaccgtcacaaaactgtcaaattcccttgcaatgattcgcgcatgcgaacctgtgaaatctcctacaggcgcttttcctgcgagccctcatgaaccacagcatcgaccacagccaccaggactccgacctgttcggcttgctttacggtttccgttttcgccccggtgaaaagggcgagcagatcgattcggccacggccctccaggccttgcgccaaccggccgacccggacgagtttttgtggttgcacctgaacctggctcacgccgcgtgcgagcgctggatgcaggcgcatctggacctgccggaagagttcttcgaagccctgcatgaaggctcgcgctccacgcgcatcgagcatgtcgactcggccctgctggcggtggtcaacgacgtggtcttcaacttcagcagcatggtctcgtcggatatttccacgctatgggtgtgtgcgcgcagtcgcctgctgatcagcgcgcgcctgcaaccgctgcactcggtggacaagctgcgctcatcggtgaaggccggtgaaagctttcgctcgccactggccttgctcgtgcacctgctgcgtgaccagggtgaagtgctgacgcagatcgtgcgcaagaccagcatcagcgtcgaccatatcgaggatcaattactctcttcgcgcctgtccaccaaccgcgccgaactgggcgcggcgcgccgggtgctggtgcgcttgcaacgcctgctggcactggaaccgggctcgctgctacgcctgctcaaccgcccgccgcaatggctgcaaaaggaagacgtgaaggagttgcgcaaatccaccgaagagtttgcgctgatcatcaacgacctgatggccctgggcgaacgcatcaagctgttgcaggaagagatcgccgccaacctcaacgagcaaagcaaccgcacgctgtttaccctcaccgtggtgacggtgctggcgttgccgatcaacatcatcgccggttttttcggcatgaacgtgggcggtgtgccactttcccaagacccggaaggcttctggatattggtggcgttggtggcgacctttaccttgatcgccgggcggtgggccttcaggaagcgcaaagactactgagctgcaacaccgttgaacatgtgggagggggcttgcccccgatggcagtgggtcagctacagattagcttgctgacccaccgtcatcggggggcaagccccctcccacataggttctgcagcgtatacaggatcagcggctatcccaattccatcaaacactgacctatggcagcatctctgtaacattctgcaatgactatgaacgacatcctccccacactggatgccccggcatggccaccccttccctgactgcctccacccacgcctcacccgctgcccccaaacccaggctggacaagaaacccagcctggtgacggtgatcatcttctttgccgtgctcgccatgggcctgttgttcaccgcctacagcctgatgcacgacatgcacgaaatgggcgcccagctcaccacctggacgccatttttgctgctgggcgtggcgctgttgatcgccctgggtttcgagttcgtcaacggcttccacgacacagccaacgccgtggcgacggtgatctacaccaactcgctgccgccgcattttgcggtggtgtggtcgggctttttcaactttcttggcgtgctgctctccagcggcgcggtggcgttcggcatcattgcgttgctaccggtcgagttgattttgcaggtgggttcgtcggccggtttcgcgatgatcttcgccctgctgatcgccgcgatcctgtggaaccttggcacctggtggctgggcttgccggcgtcgtcgtcccacacgctgatcggttcgatcatcggcgtgggcgtggcgaatgccttgatgcacgggcgtgacggcaccagcggtgtggactggagccaggcgatcaagattggctacgccttgctgctgtcgccgctgatcggctttgcctttgcggcgatgctgttgctggccctgcgcgccttcgtcaagaaccgcgcgctgtacaaggcgccaaaaggcgataccccgccgccgtggtggatccgcggcatgctgatcgccacctgcaccggcgtgtcctttgcccacggctccaacgatgggcaaaaaggcatgggcctgatcatgctgatcctggtgggcaccttgccgatggcctacgcactgaaccgcaccatgccggctgagcagtcattgcagttcgccgccgtagccgaagtcacccaagtcgccctggtgaaaagtgcaccgcaagcattgaccggtgacccacgaccgatcctctccacttacgtgcgcaccaaggaagccaccccgcaactcgtccccgccctcgcagccctggccgggcagatcggtgatgaggtgaaaggctacggttccctggccaaagtgcctgccgaagccgtcggcaacgtgcgcaacgacatgtacctgaccagcgaaaccattcgcctgatggacaagggcaaggtcggcaacttcgacgccgacacccaaggcaagctgcaactgttcaagcaacagatcgacaattccacgcgcttcattccgctgtgggtgaagatcgccgtggccatcgcactcggcctgggcaccatggtcggctggaagcgcatcgtggtgaccgtgggcgagaagatcggcaagacccacctgacctacgcccagggcgcctcggcggaaatggtagcgatgctgaccatcggcgcggccgatatgtatgggttgccggtgtcgaccacccatgtgttgtcgtcgggtgtggcggggaccatggtggcaaacgggggcgggttgcagatgcgcacgatccgcaatctggcgatggcgtgggtgctgacgttgccggcggccatcgtgctttcaggtagcttgtactggctgttcacccaactcttctgacacaacagtgattgaacatgtgggagggggcttgcccccgattgcagtgggtcagctatagataagctggctggtccaccgctatcgggggcaagccccctcccacagttttatcctgcgaacagcccggacatcagcttcaaccgcttcttgtacacccgccgcgcctccaacgcctcttccagcgtcactgccacaaaccccgcccgctggttcggttgcatctgcccgatcaaatccaggtcggcactgatcaccgtgccgatcatcgcgtagccaccacccgacaccgcgtcccggtgcaacacaatcggctccaacccggccggcacctggatcgaaccaatcgggtagcaactgtcgacgatgttcgacggatccgaccccgcgccaaacggctgctcccgtggctggaagctcaacgcactgccgcccttgaagcgatagccgatgcggtcggcttcggaacccacggtccagggctcggcgaaaaagctgctttttgccacgtccgtcaggcgctcgtaatacagccccggcaccacgcgcagggtgacatccccgcccaccgaacggcgcaacgccatcggcaaactgttgcccgcacgccccgtgccactggcttcaccgatgggcaactcgtcgccttcctgcaagcgccgaccgtgaaagccgcccagcgcgccgagggtgtaggtggcgcggctaccgagcaccagcggcacatcgatgccaccggccaccgcgaggtaagtccgcgcccccgccttgggaaactcaaagcgcaacacctgcccggcacgcacctgaaacgccgtgtcttggtgcaccacttcaccgtccaggcgcggcgacatcaaggcaccactgagggccaccagcgcatcctgttggaattccagttcggggccgatcagcgtgcactccaggcccgctgcgcccaccgggttgcccaccagatggttggccgcgctcagcgcgtattgatccagcgcgcccgacggcgggatacccaggtggtagtaaccttcgcggccaaggtcctgcacggaggtggcgaggccgggtttgaggaccttgatcatgccagcgcctcctgcagggttttcggatagccaatggggtcggcgagaaaagcgtcgagggagaattccaccgggcggatgcgcaggtcgaaacgtcctgcgtccacctcggccaccgcctgatcgtaggcgtcgcggtccatgggtttgaactgcacgatatcgccggggcggaagaacaccatgtgctccttgaggtaggccaactgctgcgccgggtcatagatcggcgccggggtcacgccgaacatctggtaaccgccggcaccgcgcaccgagtaaatgcaaccaaagcagccgccatggccgagggtgagtttcggcgtatcggtgcgtgggcgcaggtacttgggcacttgcaattggcgctcgcgctcgaccatctggaacatgaacggcaagcccgcgacaaacccgaccatcgacacaaaccacggcgcaccactgtgggctgcgataaacgcgtcgacatcagccaggccattgatgcgtgcggcgtactccaggtcggtgccgctggggtcctggtggcggtcgcgaaagcgcatcagcgtttcgtgcgtccacgggtcgttgtacagcaccgggatttcgatgatgcgcgtgtgcagggtgcgttcggccacggcctgggcttcggcggtctgcaccgcatcgagcaatacgtgaggggcaatgcggtcggggtcaaagcgaatctggaacgatgcattggccaggcacacatccagcacgccttccagcgccaggcgttccacggcgcgggtcaccgccatgcctttgaaaaaggcctccagggacatgctgtcgctgacctcggcaaacaggtgttcatcaccgccaaatctgtagcggatgggggacgtttcagccatgtctgttcctcttggaatcgttgtagaaaggcaggcgaaaaataaggcgatgatttcttattgtggtgttttgaccgtgatgcccgcttggtccagcgcttcgcgggtggcttccaccagttccagggcacccggcgtgtcgctgtgcaggcagatggaatcgaattcgataaacaggtcttcaccttccacggtgcgcacaagccccgtctgacaggcccgcaggacgcgtgccgccactgttgcaggatccagcgcccgcacattgcgggtaaacacgatggagccggtcagatcgtactcacggtcggcatagaactcccgcacaaccggctgccccagttccgtggccgcacgccagatcaccgaattgggcatgcagtacagcagcaaggtcggctcgatgatttgcaggttctgcaccagcagccgcgcagcttcttcgtcgcgggccaggtgcatatacagcgcgccgtggggcttgatgtgttgcagggtcacgccctgggcgcgggcgatttcccgcagggcgccgagttggtagagcatgtcgtccaccagctcttgagccggggcgttgatgtggcgacggccaaagccgaccaggtcgcggaagcccggatgcgcgccgatggccacgcccaattgtttggcccgctcgacggtgcgacgcatggtgccggggtcgccggcgtggaagccggtggcgatgttggccgagctgatataggccatcagttccgcgtcgacgccatcgccgatggtccaggggccaaagccttcgcccatgtccgagttgaaatccactgcctgcatcgaagtcgctccgcctaagtgatagaggaaaagtaggctgcggcttgaccccttgggaagatctattatcagatgacccatcttctgaaaatcagatagccctatgttatggagaggccgatgtccctgaccttgcgccaaattcgttatttcgtcgccaccgccgagatcggccagatttcccaggcggccatccacctgaacatatcccaatcggcggtgactacggcgatcaaggagctggagggcatgctcggcgtgcagttattcgtgcgctcggcccagggcatgaacctcacggatgccgggcggcattttctcaaccgtgcctacgtgatcctgcgcagtgtcgatgacgcgctgaacagcccgctgcccgactaccgcgccagtggcgtgctgcgcctggccgccagctacacggtactcggctacttcctgccgcaccatttgcagcgcatggagcactggcacccggacgtgaccatcgaggtcttcgagcaggagcgccaggccatcgaacagggcttgctcgatggccagttcgacatggcggtggtgctcaccgccaacctcactcacccggccatcgtttcggaaatcctcttcaattcggaacgccgcctgtggctgcccagccaccacccgctgtgcgaacgcggcgccgtgagcctggccgacgtggcccgcgaaccctacatcctgctcaccgtcgacgaggccgaacacagcgccatgcgctattgggaacaggccgggcaaacgcccctggtgcggctgcgcaccagttcggtggaagcggtgcgcagcatggtcgccaatggcagcggcgtggcgatcctgtccgacctggtgcatcgaccctggtccctggaaggcaagcgtatcgaaaccctcaccgtcaccgaccccgtcacgccgatgagtgtgggcctggcctggcaccgcgagcgcgccttcaccccggcgatgcaggcggtgcgcaattacttccacgacgcgttcctggcgccgcagcaactctcggcacggcgttagaggtgggcttgcagggtggcggccaaccagtccatgaacacccgcacccgcaacggcaaatgccgctggccggcgtacagcagtgacacgtccagcggcggcgccgggtagtccggcagcagcgcgaccagctcaccgctggccaataaatcaccgatacccagggccggcacctgggtaatcccgaacccccccaggcatgccgccttgtaggcatcggtgctgttgaccgtcacgcgcccggccatgggaacgcggtgcaccttgttgcccagcaggtattcaaagccagccgaacgcgcgcccagcggccgcacgtaatgcaccaactggtgccgcgccaggtcggccaatgtctcgggcatgccatggcgttgcaggtacgccgcgctcgcgcagttgatcatcggcatgctgcacagcaggcgcgccaccacgctttggtccggttgcgcaccgacgcgcagcacgcaatcaaagccttcggcgagcaggtcgacctggcggtcggtggtgctgatctccagctcgatcagggggtgagcatgcatgaattcgggcaggcgcggcaggatcaattcccgcgccatcacgttgggcatgtccacccgaatgcgcccgctcagttgcgcttcatcctggcgaaacaagccttccaactcttccatgtgcgacaacaggtccttgctgcgctcatacaaaacccggccgtcctgggtcgcctgcaccttgcgtgtggtgcgttgtaacaggcgcgtgccgagcagctcttccaaggcttgcacatgctcggacacagtcgagcgcggcaggccaaggctgtcgccggcctgggtaaaactcgacagttcggtgacacgcacgaaggtgcgcagcagctcaagtttgttcatttgattgttcgcctaatccgaccagttattccggtataacgctgtttatcacgttatgggcgaataaatacactgggttccactgatcacccacgaggactagaccatgacccgtaaaatcgcactcatcaccggcgccagccgtggcctgggcaaaagcgccgcgctgcacctggcggcacagggcgttgacatcatcggcacctaccacagcgcggcggctgaagcccaagcggtggtcgcacaggtccaggccctggggggccgcgccgccatgctgcaactggatgtgagccagagcggcacctttgatgattttgtcggcgaagtcggcaccgtgctcaaagacgtattcgcacaggaccacttcaattttctgatcaacaacgccggcatcggtgcccacgccagctttgccgagaccaccgaagcgcagttcgaccaattggtggcgatccaattcaaaggcccgtttttcctaacccagaagctgttgccactgatcaacgacggtggtcgtatcctcaatatctccagcggcctggcgcgtttcagcctgccgggctatgcggcgtatgcgtcgatgaaaggtgcgatggaagtgctgacccgctatcaggccaaggaattgggcggtcgtgggatcaccgtgaacatcctcgcgcccggcgccatcgaaactgatttcggcggcggcgccgtgcgcgacaatgcggcgctcaatacgatggtcgccaacaacaccgctctaggccgggcaggcttaccggacgatatcggcggcgccatcgccgtcctgctggccgacggtagcaactggatcacggggcagcgcatcgaggcgtcgggcggcatgtttctgtaaaaacgtgtcgcgcagtacgtcatagccccagtgatagacataggtgtacggcaggaaaaacagcagtacaccgatgtcgagcatgaacgcctgcatcaggctgatgttcagccacgccgcgatcaacggcacggcgacgatgatcagcccgccttcgaacatcagcgcatgcagcacccgcgtccaaccaccgttggacagttgcaggcgcaccttgagacggtcgaacaggctgttgaagatgatgttccaggtcagcgccagcaggctcaggcccagggtcaccgcacccatttccagggccggtctgccagtgatccataccagcagcggcgtacagatcaacagcgccaggccttcaaaacccagggcttggcatacacgttcagtaatcgacttggtagggctcataacctgtgctctgtgaaggacgatggttgccatgattaccctttgaatcgatacttcataactaataaccatcgatcaaggcgatagtcatggcctcccacgaagtgctgcaagcgtttgtccaggccgccacccaagggtcgttttcggcggcggcacgcaagctgggcaagagccagtccaccgtcagcgcggccgtggcgagcctggaaattgacctggatgtgctgctattcgaccgcagcagccgcaagccgacgctgactccggccggccatgtgctgctgcaacgcgccgagcaggtgctggaggccagcagccgtttggaattggcagcgagccagttatcccaggggttggagccgaaactgaccatcgccatgtcggatacctaccaatccgatcgtttcgagatcgccctcaaagcctttgagcagcgctacccggaccttgaactggaatgcctgatcgccgaatgtgaagacttgatcgcccttgtgcaaagtgggcgtgcgcatatcgcatttatcgaaaagcaggaggtctacccacccgacctgacgggcgctccggtggaagaacgcacggaaatcgcgctgttcgtcgcgccgacacacccactggcacacctgcgcaacatctcgaccgacacgctgcaacaacaccgcgaattgcgcctggccagcattatcaacccgactgaaacccgcccaaccggccgggtatggtcggcacccagttatttgatgctgatggaaatggcgcaactgggcttcggctgggcgccgatcccgcgctggctggtggagcgttttggcggcgaccatctggtcgaactcaaagcccgcagttggccacgctcggtggccgtggatgcgctgtggtcacggcaccacccgccagggccggcggggagttggttgctcggcaagatgctcgagtaactctccaccaggaccagctctttcaaagtctttgaagagccagccatatctggctaataccattccattaaaggcgaacactgcaactgtggcgagcgggcttgtcccgcgttgggttgcgaagcgaccctgggaggaggaatgcagtgcgtcaggcaatcttcggccgctggtgttggggccgcttcgcagcccaacgcgggacaagcccgctcgccacagggtgttaatcgccagttctacctaaagaccttgaaagggctgaccttaaggacgccatcgtcggcaagccgggctcctacaaagtcaggcggcctgaacctgcggcgggcggttgttctggaagtattcgtgcagggcactcaatgcgggcagcgccaatgtttgcgcggcgacgcgtcagcagccttgattcagagttcgaccagacgcttttcgataaacctgcgttcgggcgcctgctgggtcaaggccagcgcccgctcgtaggctgcgcgtgcctctgcgacgcgccccagttgccggcagaattccccccgcgccgaatgcgccaagtggtaatccagcaactcgccacgcgccagaatcccctccacctgctgcaagccctccaacggtccatcgcgcatggccagcgctacggcgcggttcagttcgatcaccggtgacggcgttgccctgagcaatacatcgtagagaccgacgatctgcggccagtccgtctcatcggcacgcgtcgcttcggcatgcaccgctgcgatggcggcctgcaggcaatacgggccaaagcgccgggtgcccagtgcgcgctccaccaacccacagccttcggcaatcaacgacgcgtcccacagcgagcgatcctgttcatccagcagcaccaactcaccctcggccgaggtgcgcgccgggcggcgggactcgtgcaacagcatcaacgccagcaaacccatgacctccggctcgggcagcaactccagcagcaggcgccccaggcgaatcgcttcgcgggtcaactcctcgcgggtcaggtcggccccgacggacgccgaatacccttcgttgaacaccaggtaaatcacccgcagcaccgcgtccaaacgctccggcagcgcgtccctggacggcacctgataagggattttcgcctcacggatcttgcccttggcgcgcacgatgcgctgggcgatggtggccggcgtggccaggaacgcccgggcgatttcctcggtggtgaggtcgcagatctcacgcaaggtcagcgccgcctgggcatccgccgccagcgccgggtggcagcaggtgaagatcaggcgcaggcggtcgtcttccacgtcttcatcgctccagtcagccgcttccagcgtgtcggcctgctcctgcaacaacggggtaaaacgcgcctgacggcgcagacggtcgatggccttgaagcgcccggtcgacaccagccaggcccgtggattggccggcacaccgtccagcggccagcgctgcacggcgacgaaaaacgcctcgtgcagggcttcctcggccaggtcgaagtcgcccagcaagcgaatcaacgtggcgagcacccgacgtgattcgctgcggtaaagggcatcgaccgagagggtcaatcgtgcataccctcggtcaccagcgtgaccagccgatccaggctctggccccagccatcgtgaaagcccatggcttcgtgggcctgtttgtcttcggcgctccagtgcatggcccgggcggtgtagagcgtcttgccatcgacctcgtcaaaggtgacttcagcagtcatgaacggcttgcccgagggtatccagcccggcatgaaggcatcggtaaacaccaggcgactgggcgcaacgatttccaggaacacgccctgggtcgggtattcggcaccgtccggcgcacgcatcagggtacgaaacaggccaccgacccacaggttcatttcgcactcgggggtggtcatgccgtgggggccccaccattgctggagcaaggcgggttcggtccaggcgcggaacacccggctgcgcggtgcatcgatcaggcggctgatggacagttcaaactcggcaggttgcgtagacatggggtaaacctcttgagtcttatggttgttgtgttcagagattcaattcacgcacggggcgcacttccacactgccgacccgggccgccggaataccaccggccacctggatcgcttcgttcaagtcgcgggcctcgatcaggtagaacccggcgagctgctccttggtttcggcaaacggcccgtcggtgatcgacagcttgccattgcgcatgcgcacggtggtggcagtgctcaccgactccaacggctcggcagccagcatgcgaccgctggcctgtacggactgcgcgtaggcgaagcattccgggtctgccgggctgtccggcgaggtgtgcaatacctgttcgttgctgtagatcaggcagaggtatttcatggatttctccgttttcggactactgactatagttcgcggcgctcacggtttcaggtcgaacagaccggtgccggtttccatgtcaaaaggcgcggaccagtgctcatgcaccaccttccactgcccgttgatgcgctggtaaccggcgctgacccgcatccagcatgtcttgagcacgccatccggcccggcgccaccacagtgggcgagccagtgggcaaaggcgctgtcttctccggcaacgatatgcagctcatgaaagtcgaaaataccggggccggggcaaaactccatgcaggccttccagtgcgcctggtaggcagccttgcctttgaattgcagggcgccaacggcgtcgaacgcgacgatatcatcggcgtaaaagctgacaatcttgtcgacatccttggccgtgacggcgtatttccattgttcgatcagggtgttgattgcagtgctcatggcgatactcctcggggtcgaaaactcacggaagacacccctagtcgaatggcccttcggcaaatcgacaacccgcttaaaaataatttcgccctcggcaaacccgctagaatccacgcctctttgtaggatttcggatgcaccaccgatggaaacccgcctcgttgcctatgagacgctgagccttgcgcagaaacagcaactcgacaccctgcaagtgcatcccgagcaactgccgtattccggcgatatctactgtgcgctgaacagcctgctggtcaaccccagccccggcgccatcaagggcttcgccctcctcgccgacgaaataccggtggccttcctgctgctcaaacgcccaccatgcctgccccattgggccgatgaacatagcgcgaccttgcatgcgttgcaggtggaccggcatcaacaagggcgcgggttcggcaaggcgtgcttgcaggcgctgccggcggcggcactggctgcgtggccgcagatcaagggcctggagttgtcggtggacgcggacaatgtggcggcgatggggttgtatctgagggctgggtggctggacagcggggaggcgtataaggggcggattgggtatgagcggaggttgaggtgggtgtttggtcaggccaaccttgacacgctcaaaatgtaacgtatacataacttaacaaaagctaagtaataaatacgtgacatggatacttctgtaatcactcatcgactcggcatccaactacgttccctgcgcctcaaccgtggctataagcaggccgatttggcgaaactggccggagttacccgacaaaaactgatcgaaatcgagaaaggcagcctctcggtctcgatgaatgcctatgcccgggtgactgcagcactgggcagcgaattcaaattagtgcctgtgaccctgccgacccttgaggaagtggaggatctatttaatgactaatcccaggttgcgtgttcacacacctcaaggtgatagcggcagcgtattgatgggtgccgatgactatctgtttcgctacggcgataacacgcaagcgcatagcgcagtcagcctgttgatgccggttcgcacagaagaatatcgccgccgagaactccaccccatcttccagatgaacctgccggaaggctacgtcctggagcaactgcgcaatcggctcgccaaaacggtcagagtcgacccgatgttgctgttggcactctcgggcagtagcgcgccgatcggccgggttttcgtgtcttcggatcaagtaaatgagctgatccatcgcaacagctctccggcaaccggagaaagtcttgacgaaattctcgcctgggatggcgcagaagacctgttcgtcgaactggtggatcgctacatcctgcgagcaggcatttctggcgtgcagcccaaggtgctggtgccggaaaagccgctgacacccgaacagaaattcacctcgaaaaccaacgacctgattatcaagagcgggcgcgacgagtttccggggttggccatcaatgaatacctgtgcatgtccattgcccgcgatgcaggtctgcccgtgccgccgttttacctgtcacaaaaccataagctgttcatcatgcggcgctttgatcgggacgaacacctcaacccactgggttttgaggacatgactacactgatgggcctgtccgccgaacaaaagtacaccaagagttacgccgccatcgccaaggccgtacgtgtgttctgtgccccggcctatcaacgcagctcactcgatcaattgtttgatagcgtggcgctgagctgcatcgtggctaacggcgatgcgcacctgaaaaacttcggcgtgctctatagcgaccccgtgcaatcggatacacgtttggcgcctgcttacgacatcgtcaacaccactgcttacattcctgaagacacattggcgctggacctgagtggaaacaaatcgctgttcgcctcacgcctgggcatcctcgaatttgccagaacctgcgaaatagaaaatcccgaaatgcgcatccaggcgctcctgcagacgcttgaagtcgtgctcaagcgcgaagacgattactgtcgattagcgcctgaggtcgcgaaagccattcggcgatccgctcagggttaccaacacagctttggcggctgaacacgcgcccgtattcatccaaggacaaggtgactctcatgctgacaactctcgaacaactcgaaaccctctacggcctcccccacgagcgcgccgtacgcaaggaaatcccgtttctcaatgaggactaccaggcgatggtgcgggcttcaccgctggtggtggtgagttcgtccgggccggacggcatcgacggttcgccacgcggggatgtgccggggttcgtgcggatcgtggatgagcgcaccctggcgattccggatcggccgggaaacaaccgcctggataccttgcgcaacctggtgcaggacccgcgcattgcgttgctgttcatcatccccgggatcggtgagacgttgcgggtgaatgggcgggcgcagatttgcattgagccgcaactgctggagagttttgcggtgaatggcaagccggcgcgctcggtgattctggtgcaggtggaagccgcgtatttccactgctccaaggcgtttgtccgctcggactgctggaacccggagaaacacctggaccgttcggcgctgccctcggcgggagcgtttcacaagcggctcaatgatgggcagtttgacgccgaggcgtatgaccgggagatgccggagcgggtcagaaccacgctgtactgatacctctgtatgagccggcttgccggctcatacacgggcaatcagcctctttctcccaccggcaaccagatctccaccgtcccggtgcccttgcgcccgtcaaaatccgcgctgtagcgctcgaaatccgcgcccatcaccttgtagcccgagtgcggcagccactcgaacatgatgcgttcgtaggtttgctccagcgcctgcaccggcccgtaatgcgggaacacggcatagttgagtggcggaatttccacgcattcaaagttgctcggcacgtcacccttggtggggacttcgaccccggccatgtagtcgaattcgccatggttggggttatggcaaacgccataggtcacaccgccgacgcgcttcttgatgtccttgatgcaggtgtcgaacaactcccacagcttagggatatcgcccacggtggccttcgaataacgcccttgtacaccggcaatcaccagggccttgcccgcttccatgcgtggctccaacggttgttttgtctgctgatccatacgaacagtctccttcttatgagggaacaaacccgtatcgagtataggggcatatccacgcggtactccatgcagaaaatttcctacacatctggacaactggccatcatcgaccgtattgtctgccccgcaggccaccgcagtggccgacgtcgctcggacggttccgggcgcttacgtactctcgaggcaacaatggccgaccaaggttcgccgcgccgctttgcgcgcatagatcgactccccccgtatgttttcaatatcactgccgagctgaagatggctgcgcgtcggcgcggcgaagacatcatcgacttgagcatgggtaaccccgacggcgccacgcctccccacatcgtggagaagatggtcaccgtcgcccagcgtgaagacacccacggctactccacctccaaaggcattccgcgtctgcgccgggcgatttcgcgctggtacaaggaccgctatgaagtggacatcgaccccgagtcggaagccatcgtcaccattggttccaaggaaggcctggcgcacttgatgctggccaccctggaccagggcgacaccgtgctggtgcccaacccgagctacccgattcacatctacggcgcggtaattgccggcgcgcaggtgcgttcggtgccgctggtgcctggcgtggacttcttcgctgagctggaacgggcgattcgcggctcgatccccaagccgaagatgatgatcctcggtttcccgtccaaccctaccgcgcagtgtgtggagctggacttcttcgaacgcgtgatcgccctggccaagcagtacgacgtgctggtggtgcatgacctggcctacgccgacatcgtctacgacggctggaaagccccgtcgatcatgcaggtgccgggcgccaaggacattgcggtggagtttttcaccctgtccaagagctacaacatggccggctggcgcatcggcttcatggtgggcaacccggaactggtcaacgccctggcgcggatcaagagctaccacgactacggcaccttcaccccgctgcaggtggcggcgattgctgcgctggaaggcgaccaacagtgcgtgaaggacatcgccgagcagtaccgccagcgccgcaacgtgctggtcaagggcctgcatgagctgggctggatggtggagaacccgaaggcgtcgatgtacgtctgggcgaagattcccgagcagtatgccgccctgggctcgctggaatttgccaagaagttgctgctggaagccaaggtgtgtgtgtcgccgggcatcggctttggtgagtatggcgatgatcacgtgcgctttgcgctgatcgagaaccaggaccggattcgccaggcggtgcgggggattcgcgggatgttccgggcggatgggctcgcccccaaaaccggcgcctgactcagtctaaatgtgggagggggcttgcccccgatggcggtggatcagtcaccagatgctgtgactgacactctgctatcgggggcaagccccctcccacatttgttccgcggtgtggcttagaccaccaacgacagcagcatgatgaaaatcaacgccaccactgacagaatggtctccatcgccgtccaggtcttgaacgtctcggccacggtcatgttgaagtactgcttcaccagccagaaccccgcatcgttgacgtgagacaggatcaacgaacccgcccccgtcgccagcaccaacagctcacggttaacccctggaatcatccccaccaccggcaccacaatgcccgcgccggtaatggtcgccaccgtggcagaaccggtcgccacgcgaatcaccgccgccaccagccacgccagcagaatcgggttgatctgcgcgttcaccgccatgtggccgatcacatcacccacgccgctggtcaccagcatctgcttgaagccaccaccggcgccgatgatcaggatgatcgcagcggtcggcgcgaggctggcgtcgagcagcttgaggatctgcttggagtggatgccctggcgatggccaaaggtgtacagcgacagcaacaacgccagcagcaaggcggtgatcgggtggccgatcatgtccatccagttgcgtaccacgttaccttcggcaaacgcgatgtcggcaaaggttttgagcagcatcaggaacaccggcaacagcacggtgaccagggtgatgccgaagctcggcaggtctttgttctcaggctcgcgggccagttgatcgaccagttcctgggacgggttgcccgggatgtacttggcgatgaacgtgccaaagatcgggccggcgatgatggccgtcggcagtgcgacgatcaggccgtagaggatggtcttgccgatatccgcgccaaacacgccgatggccagcagcgggccagggtgcggtggcaccaggccgtgcaccgccgacaggccggcgagcagcgggatgccgatcttgatcagcgacacgccggtacggcgcgcgacgatgaacaccagcgggatcagcagcacaaagccgatctcgaagaacagcgggatgcccaccaggaatgcggcgaacatcatggcccactggaccttctctttgccgaaggcgcggatcagggtctgggcgatctgatcggcaccgccggattcggccatcatcttgccgagcatcgtacccagcgcgaggatgatgccgacaaagccgagcaccccgccgaagccgtcctggaacgccttgatgatcttgtccacgggcatgcccgaggtcaggccgaggaagccggccgcgatgatcagggcaatgaacgggtgcaccttgaacttggtgatcagaacgatcaacccgatgatggtaaccactgcgtcgagcagcaggtaggactcgtgggacatgccaaacatggggggtctctcctgtttgttgttgttattaaagcgggtgttgaatttcctgccggggacagcgctatcttttccggcaaaaaatcagttggatggttcaaaaccgtgttgcagccaccaggtattggtctgctccgccagtgcctcgacgctgtctgcgctggcgttgagggccagggtcagcggctcgcccttgggcgattcaagggtggcgaactggctgtctatgaggctggccggcatgaaatgcccggggcgatgggacacgcggtcggcggcaacttcacgggtcagctccaggaacacgaaacccaggcccggcgcggcttcgcgcaggtggtcacggtatttctttttaagggcggaacaggtgagcacgggatgctcgcccgccttgagcgaacggcgcagttcatcgcacaggatgtcgagccagccggcgcggtcgtcgtcgttgagggggtggccggcgctcatcttttcgatgttggcggcggggtgaaagctgtcgccttcaatcgcggtggcgccgttaaggcggcacagggcctcgctgacactggtcttgccacagccggcgacacccatgatgaccagggcggtaacaggttgactcatgaaacacctcaggacgcagatagcgctacctttgcacgctgtaaggctagtgcaaaaacaggcttttcccgcgccgtcttgtcatttttatggagtgacgcgtgcatcctctccaatcatttgaaccggatcaggcaacccagcgttcaagcatttgcagctacttggagacagcgctaccttagtgcctcgatttttgtttggcaagccgcctgatgacctccaagaacgataaaaaaatgcgcaccacgggtcgcccgacccttaatgaagtcgcccgcctggccggcgtcagcccgattaccgcctcccgtgccctgcgcggcatcagcaccgtcgccaccgaactggtggaaaaagtgcagcaggccgccgccgaactgaactacgtggtcaaccccgccgcccgcgccctggcctcggcgcagagccattcggtggtggtgttggtgccgtcgctgtccaacctgctgtttatcgaaaccctcgaagccatccaccaggtgctgcggcccaagggctttgaagtgctgatcggcaactcccactattcccgcgatgaagaagaaaacctgttgcgcaactacatggcctaccagccacggggtttgttgctgaccggctttgatcgcaccgaaagcgcccgacgaatggtcgaggccagcaatgtgccttgcgtgtacatgatggacctggacccgaacgccggggtgaactgcgtgggtttctcgcaactggcggcgggtgagacggcggcggcgcacctgctgtcccgtgggcgcaagcgcctggcgtacatcggcgcgcaactggaccagcgcacgctgctgcgcggtgaaggtttccgccgcgcgttgcagcaggcgggcttgtatgacccggcgctggaactgctgacaccgcgcccgtcttccgtgggcctgggaggtgaattgttcctgcagttgctggcggcccatccggacgtggacgcgatcttcttcggcaacgacgacctggcccagggcgcactgctggaggccatgcgtcatggcatcaaggtgccggagcgcgtggctgtgctgggcttcaacgacttgccagcgtcgtcgttcatggtgccgcgcctgagcagcatcagcaccccgcgtgaggcgattggccggcgagcggcggagcatttgctgacgatcatggcgggtaacaaagtggccaagccggtggtggatatggggtttgagttgcaggtgcgagaaagcacttgatcaatgtgggagaggcaagccccctcccacattgctatcacccctgctagattggtccttctccaaatgccagggaagcactatgggacactcactgaaaatcttgggccgcacgtcctccatcaacgtgcgcaaagtactctggacctgccaggaactgggcatcgactaccagcgtgaagactggggcatcggctactcccctacccaatccgccgaattcctcgccctgaaccccaacgcccaggtgccggtgctgatcgacgaccacggcgtgctgtgggaatccaacaccatctgccgctacctcgtcggcctttaccaacgccacgacctgctccccgccgaacccgcaccacgggcgcgcgtcgagcaatggatggactggcaagctaccgaactcaacccgtcgtggggttatgcgttccacgcgctggtacgccagaaccccgactaccaggacccacagcgcatccatgccggcgtgcaagcctggaatgacaagatgggcctgctcgaacagcagttgatcaagaccggcgcctacgtggcgggtgatgagttcaccctggccgacatcctcatcggcctctcggtgcatcgctggcgcaacgcccctctggcgcatccgccctaccctgcggtgcaggcgtattaccagcgcctcagccagcgccccggtttcaaaacctttgccctcgacggccataactgagcacgctgcgggagaaagcatccccaggatgacgcgtttcaaacagtcgagattccaatcacttattgagtttccccatgcccgcactctccagtaccgacggcatcgacccgatccgtgccgcccacatcagcgcacgcatcgatcgcctgcccgccgttgcgaccgtctggcgccttgtcgcgctgctgtcgataggcggttttttcgagctgtatgacctgttccagaccgcgtatatcagccccggtctgatcagcgatgggattttccacaccggcagcgagggcgtattcggcttctcggaccaggctgcctttgcttcggcgaccttcctcggcctattcctcggtgccagcctgctcagccccatcgccgaccgtttcgggcgccgggcgatcttcacttttgccttgatctggtacaccgtcgctaccgtgttgatggggattcaaacgtcagcactgggcatcatcggcatgcgtttcctggtgggtatcggcctgggcatcgaactggtgaccatcgacgcctacctctcggaactggtgcccaagcgcatgcgcagttcggcgtttgcctttgcgtttttcatccagtttctgtcggtgccggcggtggcattgatgtcatggtggctggtgccgcaagcgccattcggcgtgtcgggctggcgctgggtggtgctgagcagtgcggtgtttgcgctgtttatctggcaactgcgcaagcgcctgccggaatcaccgcgctggctcgcgcaaaagggccgttttgaagaggccggggcaatcatcgacatcctggaagcacgctgccagaaagaccatggcaagccgctggatgagccggaaccggaagccgtcagcgtgcaaggcagtggccgctttgccgatatctggcaaccgccgtaccgccgtcgcgcgctgatgctgatcgtgttccatgtgttccaggccatcggcttctttggcttcggcaattggttgccggcgttgctgtcgggccagggcgtcagcgtgacccacagtttgctctacgccttcatcatcaccctcgcctacccgctggggccgttgctgttcgtgaaggtggcgaaccgttttgaaaacaaatggcagatcgtcggctcggcgatgggcgcgatgatcttcggcagcctgtttgccctgcaaaccacggcggtgggtctggtggtctgcggggtgatgatcaccttctgcaacgcctggctgagcttcagctaccactcctatcagagcgagttgttcccgaccaacatccgcgcacgggcggtgggcttctgctattcgttcagccgcttgtccacggtgttcagcagcttgttgatcggttttatcctcgagcatctgggcacgcctggagtgttggcgttcattgccagcagcatgctgatcgtgatgatcaccatcagttggttcggaccgcgtacgcggaacctggcgctggaaaacatcgcccactgagcaaggtagcattcggcggggggtcaatgtcgatggcacgtcccccccttcgttcgtagggcagttttatattgatcccgcctgactgtagcaaaccccgacactatcgaaacaactgccatgcctcacccaaccttggaacacgagtagctattagagctcttatatgaaatccatataaacctaattcaaaaattgccacacctctccagtaaaaagtcaaacaccgaactatgaatcgcttaccgcaacgaatctactgtcaacctttacagtagacaaaataacgcgcccatttacactcactccatctctaaaaagagagccccgctcaaactcaaacagaaaggaactcgccatgaccgcaaatacgaagccaatctccgcaagtttcataaccaataaaacgccaaaggccactgggcacttccaggtctccaagtcgcctcaaggcagtttcacaacagacacggtctttctgtcacagacagaacaatacaatatcgtggaatgctttattaaatggcccaatggagaagaagtcattattagtttgattgtcgaaaaaattccaggagagtcgaacggaacattcctcggggctggcatacgcccttggtccacttataacgctaaggacgccaacggaaatggtactttctactggtccgatcaaggctcctacagcatcgtttatatcccgaacatcaaacatgtcactggatccgtaacatccatctcaatacgtgacggagaagaagtcgaaattacatataattttgatgtttctgtctgaggttagaccttaaaacgccttgccttcgacatccatttaaatagggatcaaacgcagcccgaagctgccagtgtgccaaactggctttggaaaatatcgcccattgacggcaatggctggccgccggcaggacaacccttgccgcgtcggccacgccatccccaataaaaccgggcacttcacacccggcacgctatttgctccacctgtggcaccgcacatttccacaggtgaccgatcatgctggttaacaacaacacccaagccgtgtcgaccgttcaacagatcaaacggcccgacatggatcccgccaacgccgccgccagcgcgctgtacagcggtgccctgcaggccgcgcagcaaagcgtgaccgtgccggccgcgcagaaggaactggacaaggccgccgaccgcatcgacgaagccttcgccaagactcgtgtgcagttgcagaccagcgcgtcgacctcggatgtgccggctaccagcgccacctccggcgcacgtgccgagttcacagactacatgagcaaatctccggccgagcgtatccgcgagcaattgctcaaggagcagggtttgaccgaggcggatgtgcagaacatgtcccaggaaaagcaggacgctatttccaagcaggtggctgaacgcctgaagcagcagcaagaacagcaagtagcggcgaaaaccgctgagccgcaggcgcagacagtcaaagaaaccctggccgcgatctgacgccgcacaaccctgtaggagccccccgctcctacaggttattgcagttgcaacgtcgagttgaactgcccgatcgcgtccaccacatgccgtgacccttcctgaatttccaggatcacctgccccgcttcattcgccagttccacccccaggcccgtgcggctcaagctcgactgcatgctcgacaccgcgctcagcgacaggtcgtggttcttgcgcaccacatcgacaatctccaccgtcgcctggctggtacgtgccgcgaggctacgcacttcatcggccaccaccgcaaagccgcgtccatgctcgcccgcccgtgccgcttcaatcgcggcgttgagcgccagcatgttggtctgttcggcaatgctgcggatggtctgcacgatgctgccgatgatgtccgactgcttgctcaccgcatcaatgctttgcgccgcctggttcaggtcgtgggaaatttcttcaatgatctgcaccgtctgctgcaccacctccgagcccttgcgcgcacaggcgtcgttttgcaccgaggtggcgtgagccgagtcggctgcggttctcagggtggtgacctggtcggtgatgtcgctggcgaacttcaccactttgtacaggcgcccactggtgtcgaagatcgggttgtaggacgcctccaggaacaatgtcttgccgtatttgtttttacgctcaaagcggtgcgagtggtattcgccgcgattgagcgatgcccagaacgccttgtaggccggcgactccacttcgctgcgatggcagaacatgctgtggtgctgaccgacgatttcatccagggggtactgcacggttttcaggaagttttcgttggcgttgaggatctggccctggggggtgaactcgatcaccgccatggaacggctaatggcatcgatcaggctctggttttcatgttcatggtgaacccgcgcggaaatatccgacgcgaccttgattacgctctgcacgtgattgtccttgtccagcaccggcatatagctggcttcgagccacacttcctggccgtgcttgttcaagcgcatgaaggtgccgctgagcgcctcgccacgtgccaggtcgcgccataacttggcgtaggcatcggtgtgggtgtaagcctcatcgcaaaagatacggtgatgtttgccacggatgtcttcggcgctgtagcccatggtttggcagaaattgtcgttggcgtcgaggatcacgccggagggatcgaactcgatcatcgccatggagcggctgatggcggcgagtttggcattggattcggtcagggcgcaggaaaaacgttcaatttgttgcaggtcggatttgtgatggcggttgaacatgttcggatcaccctttcaaataccagcgcctggcaaggcgcattccattcacggattgaatattgctggcagatctttatgggaacaaccatccgaatcgctttataggccaagcgtcatcaacggttctggatgagcatagacagggcttgccgctacgcaaggtcactagtcaaccagcatttccaacagtgcgctgaccgcggctgacggtggacgactcggcgtgccgaccaaggcaaattcacgatactgaggcaccttcagcgccatcacccgcaggcccttgcgctggataggcagggctatttccggcaccagcgtgacgccaaccccctcgcggaccaggctgaaggcactgttccattcgcgcacttccactcggacatcccgcagggtcagacccgctgcggcccccaggctgcgcgcattggcggtacaaccaccggtagccagtacgaaaggctgctcaagtaactcctcaagcgacacacacgcatcagtcgggcgttgcgccagcacatggtccaccggcaacacggccatccataagtcacggcccaacacggtcgcattgcgctcaggcgtggggttgagcaccacgcccaggtcgacgaggccgctatcgagcaaggtgagcacttcgttgtcggtgacatccagggtggtgacctcgataccgggatagagctgcgcaaaacgctgcaatgcgggggtcagaaacgtcgccagcaccatcgggaaactggcgatgcggatcgtcccacgcaacatgggcctggcttcatccacagtgctgcgaatcgcctgcaaggcgccgagcatcacccgcgcctgttcgatcacactcaagcccagggccgtgggcaaggtcttacgcggttcacgggtgaacagttgcgcgcccaacgtcgcctccatgcccgccatggcctggctggcagcggactgggtcatgcccacgcgctcggcggcagcggtgatgctgccgtgatcggccacggccaccagcaggcgccagtgcatcaggttcatcatggcagtagctgtccttatggcgggggtctgaaggtttaattttacgcacggtgccacgcccgcgagactggcgcaaattcaacggagctgcctcagatgaaactgtatttcttcccccacgcctgttccctcgcaccgcatatcgtgctgcgcgaattggcgttgccgttcgacctggtgctggtcgataaccaggccaagaccaccgccgagggcgaagacttcctgcagatcaaccccaagggttatgtcgccgccctgaagctggacaacggccaggtactcaccgaagccagcgcgatcctgcaatacctcgccgacctgaaacccgccgccggcctggctccggtcaatggcagctgggagcgggtgcgtttgcaggaatggctgaattttatcgccaccgagattcatggtggcttggcggtgttcttcaacgacgcgatccagggcgacgtgcgcgcgctgttcgaggccacgctgttcaaacgtttcgcggtgctggtgcaaacgctggagcgccaggattacctgttggggtcgcactactcggtggcggatgcctacctgttcgtggtgctgcgctgggcagcattccacgcgattgacctgggccagtggccggcgctggcggcgtttcagcaacgcgtgggtgagcgacctgcggtggttaccgcactggccgctgaaaacccatgagttgagacgaagctgctcagcgccagcacatccagcgagcccgagcgatcctgatcatgcgtattcacctgtaaaccatgcccccggttagatatgtaaacgatgtccccggtttgtaccggggcaagcccgctcaccacacattcatggcgccttgaagacggcttgctgcacgtcgacctttttcgggatcaggccgttggcgaagaacaggtccgccgtgcgttgctgggtagcgacgtccgaggcttgcagcggccggatcggcgcgggcgagcggtgttcgaagtagcttttcaccaccgccggttgcaggcccagggtcttggccatcagtgcaatgctttcttcaggcttgtcgagggacaggcgctgcgccttgcccagggtctggatgatcgtgccgatggactgcgggtactgcttggcaaacgcgctgctgaccacaaaaaaactgccggccggattgaggccttggccgtcacccagcacacgggcggagccgtcgaccacggcggcggagtagtacgggtcccacaccacccaggcatcgactttgccttgctcgaacgcagcacggccatcggacggcgacaggtacaccacgttcacgtccttccattgcaggccggcgcgcagcaggcttttgaggaacaggttgtgtgcgctggagcccttgagcagcgccacgcgcttgcccttcagttcagccacgctctgcacggggctggccttgggcaccagcaccgcttcggtcttgccctcgttgggctcgacggcgaagtactgcaggtcgataccggcggcctgggcaaagatcggcgggatgtcgccgatattgccgatgtccaggctgccgccattcagcgcttcgatcagcggcgggccgccgaggaactcgatccactgcacttgcgtgccgggcagcgccgcttcgaagagtttgtgctcacgggccagcaccatgctcaccgagcttttctggtagccgatacgcaaggtggagggctcggtcgccagcacctgaccggcgatcaatgacagtaccgccgcagcgaagactttaagcatcagagcgcccccttgaccttggccgcgacatccgccggcacccattgctgccagacatccggatggtccttgaggaaggcttcagccacctggcggggcggcgtgcgtttctcgctcatgtcgccgaggatgccgttgagcaaatcaatcggcaggtcgaccttttcaaacacgctcaccagttgcgggtactgcgccttgaacggtgctgacacaccaatcgccaggcgcgccggcatcgagcgggtgccgatagggttggggtttttcgcgtcggacagggtcttccaggcgtcggcgttgaacggcggctcttccagcttgaccagcttgaagcggcccagcagcggcgtcggcgaccagtagtaaaacaacaccggcttgccgcgacggatcgacgacgccacttcggcatccagcgccgcaccggagccggtgcggaagttgacgaagctgtcggtgagcttgtaggccttgagtttctggctgttgacgatctccgaggtccagccggtggggctgttgaggaagcgcccacggctcgggtcttcggggtcgcggaacacgtccttgtagcgcggcaggtcggccaccgacttcaggtccggcgccaggggcttgataccccgcgcggcatcgcccttgatcacgaactccggcacccaccagccttcggtggcgcccttgaccgtgtcgcccaggccgaacaccttgccctcgttttccgccttgacccacgccggactgcgcccggcccattcttcgccgatcacctggatatcgtccttggccagggcggcttccaggctcacggtgctaccgggcagggtgtcggtgggcaggccgtagcccttctcgacgatcaggcgcagcacctcggtgatcaggctgccgctttcccaggtgatgtcaccgaagtggatgggtttgacggcttcgccggcatggacggttggggacagcaggctcagggccagcaggccgccgcccaggagtttcttcagatgcttcatcggcaacctcatagttgtgcggtgatgttcgttaaaagtcataactgggccgcgtgtaattcgccgctcaggtcgtcgttcattccaggcacagcctcaggcgacggttgaaggcgcgggtcatgtagtcgctgaccgaacgctgggaaatccccagctcggcggcgatttccgggtaggtcaggccattgagctgggacagcaaaaaggtcgccttgaccttggcgggcaagccgtcgagcagatggtcgatggcttgcagggcttcgagcatttgcgccagcgcttccggggatggcgcgacggaggtctcatagttatcgagagcgtcgaggtaggcgcgctccaggtcacggcgacgccacagttggtacatcaggcgctgggcgatggtggtgagcaaggcgcggggctggcggatcggcaccacgcccggcgcactcaggagctggacgaaggtgtcggcggcaatgtcttcggcgtgggcgcgggaatcgaggtggcgctgcaaacggctgcacagccagtcgtaatgactgcggaacaatccgcccacgtaatcgctgtgagaagtgtcggcgccggacatagtggctccatctgagaaggttgcacgttatgtccggtgttccggtggagcgatcctaacaaggctgcttattctttaataatatttaaaaggtatttttatataaccttattgaattatcggataacccgcgttgacggcctgatcctgatagctcaagagcaccgcatagtcgtcttcgctggcgcggagcacttcgtgcaagcccagtgtctcggccacctcgggcaagtcctgcaacgcctggttcatcgcccagcggatctggaccacctgttcatcactcaagcccaacgggccgatatagggcaaggtcgggctcggcgcactgcgggtaacgatgcgcagccccgccacctcccgtggcgcgaaacgggcgaggtagtcgtaggtcacgctgtcgatggcggcgaggtccgcacggtcttcgcgcagccagcgcaggctctcgcggtgggcgccgctgataccgacactggcgaagaaccgcccatcgcgttgcaggggtgcaaggcgttcgcgcaacaggttcatgccgctgttggagtcgtggccgttgatcacgccacggctgttgtagaagtccgccaggcggtggcgcgggttgtcgtcgcgggtcagcaacaggctgcaatgttcgccctgccggctgtggggcagctcatagcacgggcggccgatcacccggaccttgccgcgcaactgggtcatcagtggataaccgcaggtttgggtcaccagcaattcgggagccagccacagtccgggcaagtccagatgatcggcgtcgagacgacgccggcccaggcgttccaggatgcgcgacaaccactgttggttggcctgccggatcggctcgggcgcgacatacatcagcagttcggcgtagtgctcactcatgctcgtctctcacgcaaaggggtgccgggggctgtcgatggccttgagcccgtggcggccgatcaactggccgtagccttgcaccaggaagccaccactgcgtgcgatccattgttcacgccgggcgcgataaaccgtgggcagcaagtaccaaggcagtttcggcaaatcgtggtgcaccaggtgcaggttgttattgaggaacagccaggtccacggccaggacgcttcgttgagcacgctgcgttgctcgggccgggggtgcgggcggtgttcatagtaggaacggatcgaggccagggacaaggccggcacgctgaccagcagcaggtaatgccccatcgacagcgcgctgtagtgggcgatgaaacccagcatcagcacggtgataacaccgtgggccagccacatcggccacacctggggcaggcgctggcattcgtggcggatcaggcggccaatcgccaaaggggcagaaagcaggaagcggccgagcacggtcttggtcaccccatgcacgcagcgttcgaacagcgagctgtggtcccattgctgctgggagaggtagcggctttccgggtcgacgcccggcagggtcaagtcttcgtcgttgtggtgtagcaggtggctgtcgcggtacagcgtgtaggggtaccacacggcaaagggtgcatagccgaggattttattgagcagcagcgaacgggtgggatggccgtggagcagttcgtgttggaccgacaaccacagcgtcacgatcgggatcaacagcagtgtgctcaaccacaggcccagccaatggctgccgaggatcacggcgaaccaaccggcgtagatgccgatcaacagcaaccaggtcggccactcggttctggcggtaaagcgttgggccagggtttcgatttcccggcgttgggcaggatcaaggtagtgggccatcggcagctcagagcaggtgtttcctgctctgtgcaatggcgcgggaaaatcttgcagatcgtttggttctaagcttgtaactcagtgaccgaacaggcctgtctcggttttcttggctttcttgtcggcgcgtttttcatccgcggtctttgccggttttttcttcgcggctttctttgaatccatacctttggccatgatgcgtactccactttaaggggttgcagtgatgggtataccacctattgccgcgcacaaggcgtttataatccccggcccttgataacgctgcctgaagaccatgcccccattgcacatcgaaccgttggccgagccgctgtggccgctgctgaacaagttttaccgcaaccacaattcgtcgatgaaggcactcaagggcgggcgtttgtgggtggcgcgcgatggcgagattgttgccggcctgtgcctcacgcccgtggtcggcgggcagtggctgaccggggtgttcgttgacccggcctatcgcggccaagggctggcggcgcgactgatcacggcggcggcggccgatgtggacggtacgctgtggttactgtgccatccggaattggaagagatgtaccggcgcatgggcttcacccaggacacgctgttgccgcagtcgctcaatgaacggctggtgcgctacaagcgcaacaaaccgatgatcgcgatgggcttagatcgtttggtgaggtcgacctcggataatgtgtgatccgcgcgtacagggcccatgctagcctcggcggcacagtggccctttacaggatgatcatgaaaacgacgctcgcagctctctccctcactgccctgctcgccccagccttgagccaggccaccgacgccgcgatcagcgcccgacagtaccaaagcgtactggccggcagttggcgcgacccggccaacagtgcccgcgacggctatcgccacccgcagcagaccctggaattctttggcctgggcgccaagcaaaccgtgatcgagatcaccccgggcggcggctggtacagcgaagtgctggcaccgctgctcaaggatcacgggcagtacatcgccgccgtgcaagccgcgagcagcagtgcttacgcgcgcacgtcggaagagaacctgaagaagaaattcgcggctgaccccgcgcgctacggcaacgcctcggtggtggagttcgatcccacggcgccggtattcggcaaacctgcatcggcggatgcggtgctgacgtttcgcaatgtgcataactgggtagcggcaggcaccgcgtcggccacgttcagtgcgttctaccaggtactgaaaccgggcggcgtgctgggtgtggaagatcaccgggccaaggacggggcggatctgcaggcgatcaaggacagcggctacctgaccaccgcccaggtagtgaagctggcaacggatgccgggttcaagctggcgggacagagcgaggtgaatgccaacccgaaggacaccaaggattacccgggtggggtgtggacgttgccgccgacgttgaagttgggggagcaggataagtcgaagtatgtggcgattggtgagtcggatcggatgacgttgcggttcgtaaagccggccaaataatgctcaacctgtaggggccggcttgctgtggtgagtggggttcgtccgccaacccgaggggctgcttcgcagcccagcgcagggcaagcctgctcaccacaacaaacctgctcaccacaatcagcgcgtttgaaagtcagtcgtcggcagtggggtccatgtccgggaacatcacctcgataaacccgaacttgctgaagtcggtgatccgagacgggtacaaccggccgatcaggtggtcgcactcatgctgcaccacccgcgcatgaaaaccgtcggcaaaccgtacaatcggctcgcccttgggatcaaacccttcgtagcgaatctgttgataacggtttaccgcgccccgtaggccgggtacggacaggcagccttcatagccctcttccagcaccgggctgaggggggtgatcagcgggttgatcaggatcgtctgcggcaccggcggtgcgtccgggtagcgttcgctggcctcgaaaccgaagatcaccaattgcaggtcgacgccgatctgcggtgcggccaggccgacgccgcccacatgttccatggtctggaacatgtcatcgatcaattgccacaactcggggctgtcgaacatttccggcggaaccggaggcgcgatacgcagcaagcgctcgtcgcccattttcaggatttcacggatcatcgatcagacttcgtcaggggtgggcttggagtggtcccggccgaggcctgagacgtgctgtttttcatcagtgtggccgggttcgtcgaactctttttcaccggggtccttgccctcggcggacatgtgctcgatcactgcattcatctccgcgcctagcaacagcacggcggcggaaatgtagaagtacaggagcaacacgatgatcgcgccgatactgccatacatggcgttgtagtcggcaaaggttttgacgtagtagccaaagcccagggacgcgacgatccacaccactaccgccagcacggagcctggggtgatgaagcggaatttctgctcgacgtccggcatcacgtagtacatgagtgccacggcgaacatcagcaaaatcacaatcaacggccagcgcaggatggtccacagggtcaccacgaactcctgcatgccgatctgcccggccagccattccatcacttgcgggcccagcaccatcagcgcagcagcggccagcaacatgccggcgatgccgacggtgtagaaaatcgacagcgggaagcgcttccagatcggccggccttccaccacgtcgtaggcggcgttcatcgcgctcatcatcaggcgcacaccggccgaggcggtccacagcgcaatcacgatacccaccgacagcaggccacccttggattgctgcaactggtcgatcaccgggttcacctgctcgagggcctggggcggcaacaccagttccgactgcaggcgcagccaggtgaagaagtccggcaggtgcaggaaaccgatcagggcaatcaggaacaacaggaagggaaacagcgagaacagcatctggtaggccagtgcagaagcataggtaggcatttcgtcatcgacgaattccttgacggtacgcaacagcactttgtgcagcttgagaccatcgagaaccggaaaaatcatagcgtctcctttcgccgcaaaaagttgagtttgtgggcgactcaggggccgttttctacatcaaggtagcctatttggcgaccttgaaacaatttcgaaactttaatcacgccgtgtgacataaaaacggccatccgtggatggccgtttggactgcttgaaagcgcgtttacttggtcgcttttttcactgcgtccttggtgtcgcctaccgctttctgcacttcgcctttcttttcctgaatgacgccttcagcgcgcagtttgtcgttgccggtgactttaccgacaccttgcttgatattgccgaccgcctcgtttgccacgcctttaatcttgtcagatgtgctgctcatggtatttctccgaaagaacaatcaaggtttttgggtcattacctaaagattgacccgaggccgttgcgcagagtttcaaatatttttacccaggcatttcatcgccgaccgcaggtttggctttatgttttgcggccaacccacgagaatgcccggcacattcaggctataacgctgaataacagatcccgtaggaaggttatgaaactcaataaagcacaggccatcgcccgcagaaacaccgaactgggcggagccgtactcggcgtcaacaactgccacttcaccgacctggaccgcaagcgcaacatctggtggttcgacctgccggtgggccggattgccgtgggccagtacgagtggatccacctgttgatgcacaacgccgagaccgaccagttgttgcacctgaaggtgccaacgctgttcttgcgtgaaaagctcgaaggcctggtggtacgcaatgcgggcaagcgcaaaccggagatcactctggagctgagcgcggacaaggattcgttcttgaaggatgtgcgtccggcagggactggcgtgagcttcgcgcagttcgccctgtaaaaaacgctgttcaaaatgtgggagggggcttgcccccgatagcggtgtatcagtcagcacatcggtagctgacacactgccatcgggggcaagccccctcccacattggtagagcgttactttttaagaccgagcttcttcaactcttcatcgcgcagctcacggcgcaggatcttgcctacgttggtggtcggcaacgcatcgcggaattccacggccttgggcactttgtacgcagtgacgttggcgcgcatatgctccatcacctgctccttggtcagggtggcacccggcttgaccacgatgaacagcttgatgtgctccccggacttttcgtccggcacgccgatggccgcgcactgcagcacgcccggcagacctgccagtacgtcttccagctcattggggtacacgttgaagcccgagaccaggatcatgtccttcttgcgatcgacgatgcgcatgtagccgtcaggctggatgatcgcgatatcaccggtcttgagccagccttcgctgtcgagcatctcgtcggtggcgtcctggcgctgccagtagcccttcatcacctgcgggcctttgacgcacagctcgccggtttcacccagtgcgagttcagtgccgtcatcggcgatgactttacacacggtggacggcaccgggatgccgatggtgccgatctggatatgctggatcgggttcacggtagccaccgggctggtctcggtcatgccgtagccttcgcaaatgccacaaccggtcaccgccttccagcgctcggccgctgccaattgcagggccatgccgccggacagggtgactttcagcgcagagaaatccagcttgcggaacgcttcgttgttgcacagcgccacaaacagcgtgttcaagccgacaaagccgctgaacttccacttcgacagttccttgaccatcgccggcaggtcgcgcgggttgctgatcagaatgttgtggttgccgatcagcatcatcgccatgcaatgaaaggtgaacgcatagatgtggtaaagcggcagcggcgtgatcaggatctcgcagccttcattgaggttggagcccatcagcgccttgcattgcaacatgttggcgacaaggttgcggtgggtgagcatcgcgcccttggccacgccggtggtgccgccggtgtattgcagcacggccacatcgccgctggccgggctggcatcgctgaccggttggccgtgccccttggccagcacgtcgttgaacttgatcgccttgggcaggtgatacgccgggaccattttcttcacgtacttgatgacgctgttgatcagcaggcgcttgagcggcggcaacaggtcggcgacttcggtgacgatcacatgcttgacggcggtcttgggcacgatcttttccgccaggtgcgccatgttggccaggcacaccagggccttggcgccggagtcgttgaattggtgttccatttcccgcgcggtgtacagcgggttggtgttgaccacgatcaggccggcgcggatcgcaccgaacacggcgaccgggtattgcaggacgttgggcagttgcacggcgattcgatcgccgggcttcaagtcggtgtgctgttgcaggtacgcggcgaaggcgccggacagttcgtacaattcaccgtaggtgattgtcttgcccaggttgctgaaagccggtttgttggcgaagcgctggcaggactgcttcagtaccgcctgaatattcggatactcgtctggattgatttctgcggcaatcccggcggggtacttatccttccaaaagtcttcgttcatggaagcccactcctcagcgacgtcagcgacgcgaattcatcatcgcatttgatgcgattattattggtgtatgtttttttaggtgaatctggcgctttcaagcaggccgagacgtcacaaagcgcgccgagagtagcagctttgccaaaggccgcctagagccaaaagagggggccacggtcataaacacgactgtcctacaatatttggtcacactttaaaccaagctgaaatagcccgataaagagctctggaacagggctttcagaacagcaaggtacaaatgtgggagggggcttgcccccgatagcagtggttcagtctacacatctggtgactgtcccaccgccatcgggggcatgccccctcccacaattttcagcacatttcagatcaagcgatatcgcgcagctccctgcgcaagatcttgcctaccggcgtcatcggcaacgagtcgcgcaacacaatatgcttaggcaccttgtacccggtgaagttggtcttgcagtacgccttcaactcctcaaggctcaccccttcggcacgcgccaccacgaacagcttcaccgcctccccggtgcggtcatccggcacaccgatcacggcgcagttggccaccgccgggtgggccatcaccacgtcttcgatctcgttggggtacacgttgaaacccgagacgatgatcaggtctttcttgcggtcgacgatgctgacgaaaccatcgacatcgatcaccgcaatgtctccagtcttcagccagccttcggcgtccaacgcctcggcagtggcgaccggttgctgccagtagcccttcatcacctgcgggcccttgatgcataactcaccgcgctcgcccaacggcaactcgtgaccttgatcgtcgatgactttcatcgcagtgcccggcaccggcaggcccacggtgcccaggcgcgactggctgccgtaggggttggtactggccaccggcgaggtctcggtcaggccgtagccttcaccgatggagcagccggtgatggccttccagcgctcggccgtggccttcaccagtgcggtgccgccggaattggtgatcttgaggtgggagaagtccagggtcttgaagtccggatggtccatcaacgccacaaacagcgtgttcagccccagcaggcaggagaaccgccacttcttcagttccttgatgaaaccgccgatatccctcgggttggtgatcaacacgttatggttgccggtcaccatcatgcacatgcagttcgccgtgaaagcatagatgtggtacagcggcagcggcgcaatcatcacctcctgcccttccctcaccagcggctgtccatcatcggtgacctgggacatgcacgcccgcgcctgttgcatgttcgccaccaggttgccgtgggtgagcatcgcgcccttggccaggccggtggtgccgccggtgtattgcagcaccgcgatgtcgtccagggtcaccgggtggcgggtcacgcccaggcccgcgcccatgcgcagggcgcgcttgaatgacaccgcgcgcggcaggttgtaggccgggaccatcttcttgaccttgtcgaccaccgtgttgatcagccaacctttggcagcgggcatgaaatcgcccatcttggcttcgatcaggtagtcgatctcggtgtcgctgcacacctcctgcacccgcgaaccgaacaggttgaggtagaccagcgcacgcacgcctgcgtccttgaactggtgacgcatctcgcgcggggtgtacagcgggttggtgttgaccacgatcagcccggcgcgcaaggcgccgaacacggcaatcgggtaatgcagcacgttgggcatctgcaccgcgatgcgctcgcccggcttgaggtcggtgtgctgttgcaggtagccggcgaaggcggcgctctggcgctccagctcggcgtaggtcagggtgatacccatgttgctgaatgccggacggtcggcgaaggccttgcaggagcgctcgaagacttcgatcaccgacttgtaggcagagaggtcgatgtcgttgggaacgcccgctgcgcgtttgtcattccagaaatcaggttgcattattcttgtcctcttacctgagtgtgtccggccgctttctgactgctatgaaaagcggagctttggggacgttagcagcaatagccaaacaggcaaatacagcaaaccgtgtcattgattgtatgaatcttgccgctgacgtgtaggcagatgcgccgatcctcggcagatgagctatacactgcaacaaccccgagctgaccttgagcagcccctgagcaaaggaaccgccatgaaccacagcaccttctggctgaccgcgaatgaccgcagccgcctgtacgtcaatcaatggatgcccgaaggcccgaccagggccctggtgatgctgtcccatggcatggccgagcacagcgggcgctatgcgcgcctggcgcacaccctgtgcgacgccggctacggtgtgtatgcgccggaccaacgaggccacggccgcacagccgacgaaggcaccctgggcctgtacgccgagcacgacggctggaacaaggtagtgggcgacctcgccagcctcaaccagcatatcggccagcagcagccagggttgccgatcattctgttgggccacagcatgggcagttacatcgcccaggcctatctgctgcaccacagcgccagcctggatggcgcgattctcagcggttcgaatttccagccagtggcgctgtaccgcgccgcgcgggtgatcgcccgggccgaacggctgcgccaggggttgcgcgggcgcagtgcgttgatcgaattcctgtcgtttggatcgttcaacaaggcgttcaaacccaatcgcaccgctttcgactggctcagccgtgacccggccgaagtggacaagtacatcaatgacccgctgtgcggcttccgctgcaccaaccagctgtggatcgacctgctcggcggcttgcagcaaatcagcaaagcgtccaatctcgcgcagatcgatccgggcctgccgatcctggtgatgggcggtgaatgtgatccggtgagcgaaggcaagcgtctcaacagcctggccaacgccctgcgtgaagcgggctgccagcacctgcaactgaatatctacccgcaggcgcgccatgaagtgttcaacgaaaccaaccgtgatgaagtcacggcggatgtactcagctggctcgaccaggccctgacgttgcgcaggcccacccgctgcgaataaattttcgattaaaatcagtcagttaaattaccgattagccacaggatgcacgtttagatgacccaggtaaccaacaccccgtacgaagccctcgaagtcggccagaccgccagctacagcaagctggtggaagagcgtgatatccagctgttcgccgccatgtccggtgaccacaacccggtgcacctggatgccgagtacgccaaggcgaccatgttcaaggagcgtattgcccacggcatgttcagcggcgccctgatcagcgcagccgttgcctgcgagctgcctgggccgggcacgatctacatcggccagcagatgagcttccagaagccagtaaaaatcggcgacaccctgactgtgcgcctggaaatcctcgagaaactgccgaagttccgcgtgcgcatcgccacccgtgtgttcaaccagcgcgatgagttggtggtggatggcgaggcggaaatcctggcgccgcgtaagcagcaggttgtgacattgaccgagttgccgccgatcagcattggctgatagcaatttcaggctcaacacaacaccaatgtgggagggggcttgcccccgatggcggttgatcagtcaatgaatcggttgactgatactccgccatcgggagcaagctccctcccacattggttacagcatttacaaccctgggcttacgactgagcgcgagcctggttacgcagggctttcacctggtcgtggttgcgttgcacgccatggtactgacgttcaaccaggtcacgaatgcccagcaggttgtgcttgttgatcttctcgatcgcttccttgtaagccttcagtgcgtggtcttcaccgcgctcggcttcgttcagcaccgcctcttcatctttaccggtgagcatcgacttcacgtcgacccaaccacgatgcaaagcgccggcaacgctgccggaatcttccggatcaccacccagggcacgcacggcggtcttcagctcggcagcagcggtggcgcagtcggctgaacgcttggcgaacagggctttgagttctgggtgcttgatgtcttcagcgcactccttgaaacccttttggccgtcgatgctggtttcgatcaggtcgttcagtacggagatcgattctttattgatgtcagtcatttttcaattccttgtacgggttagaaggttgtcttagtggttgcagcgcccgtgccaggttttcaaaaaacaaattattcatatatttcagttatttacgattaattgaaccatctgtatgtacgttatttgcatgatctgtcatttggccttcatgcagaatgcctgtattttccaacgtcacgactcaaacacccgagcctgcatgaatcccgaaaaactcgaactgctgatcacccgcgaaatgcccttcggcaaatacaaaggacggatcatcgccgacctgcccggcccgtacctcaactggttcgcccgtgaaggtttcccccacggcgaactgggcggcttgctggcgttgatgcaggaaatcgacagtaacgggttatctgaattactcgaaccgctacgcgccaaacacggcaaacccgcaccgcgccattaagagccccccctatgccaaggaatgcagacaacgaacgtcattggcaggctgtttccgagcgctatgccctggaacccggcccgatcaatctggaaaacggttacttcggtcgcatgagccgaacggtgcaatcgcattacctggaacaggttgcgtttatcaaccgaagtaattcgctgcatgtgcgccaacgcttcgagcaaggcgagaacgtcgagattcgtcggcaactggccgagctgattgatgtggacccggagtcggtggcctttacccgtaacgccaccgaagccttgcaatcactgatccgcaactacaaccgcctgcaaccgggcgaccaggtgctgatcagtgacctggagtacgacaccgtcaagggtgcgatgcgttggctggccggcgttcgtggcgtggaggtgatcgaactgtcccacgcacacccggccagtttcgacagcctggtgcagacctatcttgatgcgtttgtgcagtacccacgtttaaagctgatggcgctgacccacgtcacccaccgcaccggcctggtgatgcccgtcgaagccgtcgccaaggcagcgcgcgagcatggcgtggacgtgatcctcgacggtgcccatgccctggggcagatcgagttcaacctggccgagctgggcattcagtttgccggcttcaacctgcacaaatggatcggcgcgcccctgaccctgggctttttgtacatcgccccggagcgcctggccgatatcgacccggacatgggtgagtttcactaccccaccaccgatgtgcgtgcgcgtacgtcctacagcacgccgaactttccggccttgatgaccttgccgctggtgtttgaagaacatcgcgccttgggcggctcggcggccaaaggtgcgcgggtcaattacctgcgggacctgtgggtgagccaggtgcggccgttggcgggaatcgaggtactgacgtcggatgatccacggctgtattgcgggatcacggcgttcaagtttgtagggcgggatcagcaggtgatgacagagcgattgctcaaggattacaacctgttcaccactactcgggtgggcgcggcgtttggtacttgcattcgggtgacgccggggttggtcacttcggcggcggatatcaatgtcttggtaaacgccatcaccgaactaaacaccgattaaaactgtgggagctggcttgcctgcgatagcggtgggccagcgaatgcatgtgtgactgatacaccgccatcgcaggcaagccagctcccacatttagagtggcgttggtcttaaggttttcttcaggcaaaaaaaagcggtacaccgaccaagtgcaccgccaaaaatgccgttaagcacagcaacaacgattcgataaatcagtccagcagcgccagtgcctgcgcggtgacttcctggatacgggcccagtcgccgttcttgacccactccgggtcgagcatccagctaccgcccacgcacatcacgtttttcaacgccatgtagtttttgatgttggccgggccaacgcctccggtcgggcagaatttcacttcgccgaacggaccgcccagggccttgatcgccgccacgccgccgctgacttccgccgggaacagcttgaagcgacgataacccagaccgtagccctccatgatgccggaggcattgctgatgcccggcagcagcgggatcgggctgtgtaccgaggcttccagcaggtcacgggtaatgcctggagtgacgatgaattgcgagcccgccacttcggccgcttcgagcatgtgacggtcgagtacggtgccggcccccgtgcacagttcagggcgttgttcgcgcagtacctgaatggccttgaggccgaactccgaacgcagggtcacttccagtgcggtcaaaccaccggctgccagggcatcggccagcggcagaatgtcctgttcgcgggcgatggtgatcaccggcaggatccgcgccttggcgcagaggctgtcgatcaaggcaactttgtccgccatggacacggtcggttgagggcttttcatagcggctgatccttggctcatgggcaccagtaaatctctaatgtaggttgcagaaacgcgcgaatcggcatggcagcgacgtcatcactggccagcgcggcgctcaaggtggtcaatttcgaactgccggaaatcgacagcacggtgtagttcgccgtggccagcaacgcgcgactcatggtcaggcgctggtgcggcacggtcggcgccagcatcggccagcaacgacgggtaccgtcgggctgcaaggcctggctcaggttcgggctgtcgggaaacagcgatgcggtgtggccgtcatcgcccatgcccagcaccagcacatcgatggctggcaattcggccagcaggcgatcggcctgctcggcagcgtcttcgaggttggcggcagcgctgtacaggctcaagaacctggccttggccgccgggccttgcagcaggtgctgcttcaacaggccggcattgctgtcggcatgttcgaccggcacccagcgctcgtcggccagggtgatggtgaccttggaccagtccaggccctgcttggccaggtgctggaaaaacgccacggggctgcggccaccggacaccaccagggtcgcttcgccacgggcactgatggccgtgcgcagttgctcggccacgtcattggccaggccttccgccaacagcaccggggtacggtactcatgaggggttacaccctggggcagtttcaaatcagatatcgccataccacgacctcccgtcccgcgtgatcagtgcaatcgagctcatcggcccccaggacccggccgcgtacggcttgggcgcatcaccggatttcttccacccggcgatcaactggtcacaccacttccacgcggcttcgatttcatctttgcgaacaaacaggttctgattgccgcgcatcacttccagcaacaaccgctcgtaggcatccgggatccgggcgctgcggtaggtgtcggaaaaattcagttgcagcgggccgctgcgcagttgcatgcccttgtccaggccctgctccttggtcatcacacgcaaggaaataccttcgtccggttgcaggcggatgatcagcttgttgctgatctgcaggcgctgctcgggggcgaagatgtagtgggacggttccttgaagtggatgacgatctgcgacagcttctgcggcatgcgcttgccggtgcgcaggtagaacggcaccccggcccaacgccagttgcggatatcggcacgcagggcgacgaaggtctcggtgtcgctctgggtgttggagttttcttcttccaggtaacccggcaccggcttgccggcgctgtagccggcgatgtactggccgcgtaccacctgagtggtcaggccgtccgggctgatgggcgccagggccttgagcaccttgaccttctcgtcgcggatgctgtcggcggacaggtcggccggcgggtccatggcgatcaggcaaagcagttgcagcaggtggttctggatcatgtcccgcagctggccggccttgtcgaagtaaccccaacggccttcgataccgacctgctcggccacggtgatttccacgtgggaaatgtagttctggttccactgggtttcgaacaggctgttggcgaaacgcagcgcgatcaggttctggacggtttctttgcccaggtagtggtcgatgcggtacgtgcggttctccgggaagaactgcgccacggcgtcgttgaccttgcgcgaggattccaggtccgaaccaatcggtttctccagcaccacgcgggtgttgtccgccaggccgaccttggacaggttctcgcagatggcgccgtacaccgccgccggggtggcgaagtaggcgatcaggcgctgctcggtaccggcgatgtccgccagggccacgtagtcatcagccttcaggaagtcgacgtgcacataggtcaggcgcgccaggaagcgctgggcgatggtttcgtccagttccttgccgacgaactctcgcaatgcgtgctcgatgtgcgccaagtgctgttgttcggtgccggcttcgcgggccagggccagaatgcgcgtgtcgtcgtgcagcaggccggcgccatcgagttgatagagggcaggaaataacttgcgcagcgccagatcacccaaggcgccaaacagggcaaaggtgcagggttctacggttatcgaaggcatgatgtttgttcttttatcaagttaagctacaaataccttttttcaaggcatcactcaaggaaaaatgtagtaataaccacaacattttcccgaaatacgcattccgagtggtggtgttcagctaccctcagtaggataggccaccgcaaaaggccactcgtcgattggttgccaccctaatttgcatcgtcgcccgaaggaaagactgaatggaccgcgtgcgaaatcttctggaacagatccggaaccgcctcgaagaattgaacaaggccgagaaaaaagtcgccgaggtcatcctgctcaacccgcagcaggcgacccgcttctccatcgccgcccttgcccaggccgcctcggtcagtgaaccgacggtcaaccgtttctgccgttcgttcggcgtgagcggttaccctgaactgaaattgcagctggcgcaaagcctggccagcggcgcagcgtatgtcagccgcgcggtggaggccgatgataaccccgaggcctacacccagaagatttttggcagcgccatcgcgtcgctcgacagcgcctgccaggccctggacccggccctgatcagcaaggccgtggacctgttgatccaggcgcggcagatccacttcttcggcctgggtgcttcggccccggtggcgatggatgcgctgcacaagttcttccgcttcaacctggccgttaccgcccatgccgacgtgctgatgcagcgcatgatcgcctcggtggcgcacactggcgagttgttcgtgatcatttcctacaccgggcgtacccgtgagttggtggaagtggcgcgcatcgcccgtggaaacggcgcttcagtgctgggcgtgaccgccgagaactcgccgctggccaaggccagcacggtgagcctgaacattccactgcccgaagacaccgacatctatatgccgatgacctcgcggatcatccaactgacggtgctggatgtactggccaccggcatgaccttgcgtcgcggggtggatttccagccgcatttgcgcaagatcaaagagagcttgaatgacagccggtacccggttggggatgagttcaactaagccggcctttgtgttggctgtactggcctcatcgggggcaagccccctcccacactttgatctgtgaatacattcaaaatgtgggagggggcttgcccccgataaggccagcagccacactgctatacccctgctcgagcctgcaaactcaaatgcgccctctcccccggcgccaggctcgccccggccatcgccgactccacgcacacaaaccccgacgcctcgttgaagctcacgcccaacagcggccggctgcccgggtgccacaccaccgtgtcggcgctgtcgccggtgtcgatgcacagttcgcgctgccaggcgtggtccttgagctgcaattcgccctcgtgctggaacacccgctggcaaccgccctccacccgcaattcaccttcctgctggcagacctgacgattgagctggtcgtaaccttgcgcaccgtcaagcccagacagcgctatctcatcaacatgaccaatacgccaataagcgtgcaatgcatggctcagctggcacggcaactcatcctgatgctcggtgctcaggcgcagctccagggtttcgcccaggtgcgcatgcaggtcgacctgccagtcgcacagctgcaattgccagtgcaggcgcacaccgtcgtcgtcggtgctgctgtcgagcaatttccagtcgatcaagcgcgcccagccatgggacggccaggcattttcactcgggtggcggccataccacggccagcacaccggcacgcctccacggatggcaccgacttgcggccacttggcggcacaccacaaccagggtttctggccggtcggctgaaagtgcagcaattgcgcgccttggcgactgaacaccgcctggcacagcggatgatcgatcaccaacacgtcacgcatctggaaacgctcccaggcgaacaccgggcgctcgcgcaaggatttgaaaaagcgttgcagcggttgctcatgcatgtgccacagtcctgaaaatcatcacaatgcagcccaaaaaaaagcggatagccatggctacccgcaaaatgcgcacagagagaaggagcttatcgcaacagcgttagaacgtagactgaattttcaggccagccaccaacgcgttgtcgactttgtccacgccgccaggctggacgacgtattgcaggttaggacgcacggtcagccagttggtgacgtggaagccgtagttgatttcgaagttgtactcggtttcgcggattggcgtgtaaagcgcattgtcgtagtcgttcacgccattggcgacgttgagcagttcggcgtttttcttcacgtcgttgttgacgtgcagacgcgcggcaccaatacccacgtcgtcttttggacgcgcatcgaatgggcctttgtacaccagcatcaacgactgatagttgtcgaccaggttggtttctttgtcgtggaaggtggcgttggccgcgatgttcagaccgcgggaagcgtcgccgttgtgcgtggtgagctgctgttgggcaacgaaccagtagcctttcttgctgctgtgggtacggtaggcggcgccagtggtcgctgcatcgttgccgttgatgtcttcacggacgtcagaggcatcagccgcgctcttgtagtaacccacacggtattcgcccggcaggttgttgaccttaggcgaccagaccaattccaccgggatcacggtgcccttggtgccgctgccgctgagcttgaagccgttgccgtgctccagctgcgacgggttctggttgtacgcaccgatctgcgcatacagctcaggcgtgatgttgtacttcacgcggatcgcggcctggctgaccggccagttgtaccaggtgttgacatagttacccacttgcgagccgcagaacgacaggttctggaagtcgcacgggaaggtgttgaagtcttcgccttcgccgaagtagccgagtttcacgtccaacttgttgtcgaacatctggtgctggatccagaactgggtcagacgcaccatgtggccacggccgtagacttccatcgaagagctcagcgtgccggcacgcgggtcgccaatgcggtcgttggagatgttctggccattacggttggtcaactggatcttggcctgggtattgtcccagccccacagtttttgcaggtcaagtgccacgccgagaccgaactggtcagagtaacgaccggttttgtcgtggttgtagccgcccttggcgttgtagcccatctccccaacgtagtcagccttgatgtcgataccttgctcgatcagcttggtacgctcaccgccccaatcgccggtcatccacttggaatcagcgctgaatgcatcggccgccatcgcattggcggacagtaccagggctgctgcagctgacatttggcagatcagccgagtgttgttgtgttgctttttcatccctacatcctcgtctttattgttattaaactgtttttatctaacgcggtttactttttttatctaaaacaacaacttatctgcttcagcggcctttgaattgggccacgttgtcggcatgcccctgtgtgggcgatgaagaaacagtgcccagtcgctcgcccgtgttggcgtcgaacagcagtaccttggaaggatcgaattgcagggtcagggtctcgcccacctgcggtgccacgtcgggtgccaggcggcagcagaccttggtgtcattgagttgcacgaacaccagggtgtccgggccggttggctcggtcacctggacttcggcacgaatgctcgacgcactgttgccctcgcccgccgccaacatgatctgctccggacgcaggcccaggatcacgtcgcgatcttccaggccggcatccgtggtgttcagggccagctcacaacgcgcctggccgctgtcgagcaatgccaccaggcggccgtccttgcgctgcagacgcagcggcacgaagttcatcggcggcgaaccgataaagctcgccacgaactggttggccggattgttgtagatctctttcggcgtgccgaactgctggatgatgccgtccttcatcaccgcgaccttgtcgcccagggtcatcgcttcgatctggtcgtgggtcacgtagaccgtggtggtcttgagacgctggtgcatcagtttcatttcggtacgcatttcgacacgcagcttggcgtcgaggttggacagcggttcgtcgaacaggtagatcttcggccgacgcgccagggcacggcccatggccacgcgctgttgctggccgccggagagctggccaggcttgcgattgagcaggtgttcgatctgcagcagcttggccacccgcgccacttcggcgtcgatatcggcctggggcatcttgcggatcttgaggccgaactcgatgttctcgcgcacgctcatggtcgggtacagcgcgtaggactggaacaccatggcgatgtcacggtccttggggctcatgccgctcacgtcctggtcgccgatcatgatcgcgccgccggtgatggtctcaaggccggcgatgcagttcatcagcgtggatttgccgcatcccgaaggaccgaccaggatcaggaattcgccttccttgatcgacagttcgatgttcttcaaggtgtcgggcaggccggcgccataggtcttgtttacattgcgaagttcaagcgtagccatgattaccccttgaccgcgccggccgtgaggccgcgcacgaaatacttgcctgcgatcacatagaccagcagggtcggcagcccggcgatcatcgccgccgccatatccacgttatattccttggccccggtgctggtgttgaccaggttgttcagcgccaccgtgatgggctgggagtcgccgctggagaacactacgccgaacaggaagtcgttccagatctgggtgaactgccagatcaggcagaccatgatgatcggggtcgacatcggcagaatgatctgacggaagatggtgaagaagcccgcaccgtccagacgcgcggccttgatcagcgcatccgggatgctcacgtagtagttacggaagaacaacgtggtgaacgccagcccgtagaccacatgcacaaacaccaggccggtggtggtgctggccaggcccatcttgccgagggtgaacgacgccggcagcagcacggtctggaacggcaggaagcagccgaacaacaacaggccgaagaacagctgcgaccccttgaagcgccagaacgacagcacatagccgttcaatgcaccgatggcggtagagatcagtacggccggaacggtgatcttgatcgagttccagaagtagccgtccacagtcgcccaggccttgacccagccgatgccggtgaccacggtcggccagctcagcaggttgccggagctgatgtcttccggggtcttgaagctggtcagcagcatcaccaccagcggcaccaggtacagcagcacggcgaggatcagcaccgcgtagatcgcgatgcgactcaggctgatggcaggtttggaggcgagactagtcatgacgtttggtcctcagctcggagtagaggtaaggcacgatgatcgcgaggatcgcaccgagcatcaggatggcactggccgaacccatgcccatctggccacggctgaaggtgaacgagtacatgaacatcgccggcaggtcggacgagtagccggggccgccagcagtcatcgcggctaccaggtcgaagctcttgatcgcaatgtgcgccaggatcatcaccgcactgaagaacaccggacgcaggctgggcagcaccacgctccagtagatgcgcggcaggctcgcgccgtcgatctgtgcggcgcgcacgatcgattgatcgacgccacgcaggccggcgagaaacatcgccatgataaagcccgaggcttgccacacagcggcgatcaccaggcagtagaccacgcggtccgggtcgatcagccagtcgagacggaagccttcccagccccagtcacgcaggagtttgtccaggcccatgcccgggttgagcagccatttccaggcggtaccggtgacgatcatcgagagcgccatcgggtacaggtaaatggtgcggataaagccttcgcgacggattttctggtcgaggaagatcgccagggtcacgccgatgaccagggtgatgccgatgaacatcccgccaaacaccgccaggttcttgctcgctacccaccagcggtcgttgtcgaacaaccgcgcgtattgcgcaaggcccgcccatttgtagcttggcaggaacgtggaattggtgaacgagagtacaaacgtccacaggatgtagccgtagaagcccaccaacacgatgaacatgctgggcgccagcaccagtttgggtagccagcgctgcagtgcatcgaacggcgaggctttgctgaacacagcaacagaactcatggggaaatccagtacagggaaaaaggactacaggaacaagccttgcggggggccagggagtccccccacaaggtcaaccgttacttggcggacttgatcgcagcgccaagtttcttggcggtgtcggccgggtcggctttcgggtcgttgatgtagttggtcacgacgtcaaagaacgcaccttgcaccgccagggtcgtggccatgttgtgcgccatgcttggctgcaggccgccggtcttggcgtctgccaggaagtccttggcagcggtctgggcgcaggagtcgaagccgtacgagtccattttgttcagcatgtcgttacgcacagggatcgaacccttgttgatgctgaacactttctggaagttttcacccagcacgactctggcaatgtcctgctgaccggcagcagtgcctttgtctttctgcttgaacaccgccagggagtcgatgttgtaggtgaaggctttgtcggtgcccgggaaggctacgcactcgtagtccttgccggcgactttcttggcggcggtccattcggacttggcccagtcacccatgatctgcatgccggccttgccgttgatgaccttgcctgcttcgaggttccagtcctggcctttgccgtcgacgtccatgtaggtcgcgactttcttcagctcggtcaaggccttgaccatttccggaccggtcagtgcggcgttatccaggtcgaccagggctttcttgtagccatcggcacccatcaccgagagcaccaccgcttcgaacacggtgctgtcctgccaaggctggccaccgtgggcaagcgggatgaagccggctttcttcagcttgtcgccggcggcgtagaattcttcgagggtggtcgggttcttggtgataccggctttcttgaagacttccggattgatccacagccagttcacgcggtggatgttgaccggtacggcgacgtagtcaccttcgtacttcacggtatcggagactttcttgtcgagcagggagtcccacttttcttctttggcgacgtccttgagcacgtcggtgtcgagcaggccagtggacgcccattcctggatgtcggggcctttgatctgggcaacacctggcgggttgccggcgactgcacggcttttcagcacagtcatggccgtggcgccaccgccacctgcgacggcaccgtctttccaggtgaagccgtctttctcaacttgggccttcaggacatctacagccgccttctcaccacccgaggtccaccaatgcacaacttcaaccgtccctttcgagtcggcggcaaatgcactgaggggaaacaacgaggcaatggaaatagcgacggcgaggcgattaatcgcgttcatctgagtaccttttcttgttgttatgcatgcaagtcttaggcttgcgctgcacggagtttaaacagggttttttgaggcgcaggtaacaaagggatgcacaaatgtcaccagttggtgacatagcgcccagccccgatggcactggccatgctgggtgccaagggcagtgcgggcagcacgaccgcttgccaggcatggtacaggtccggcttgccgccccatattttgctgctgggttggttgtgcgggctgagttcgtggtgccagctgccgtggatgcggtcgataaagtgggtttcgcagaactcccagaaacgccggtaccaggtttcgtaatgcaattcgccggtgcgtttgagcaaggcctgggcagcggcgctggcttcggcgtgggtccagtgcaggcgctcgcgcaccaccgggcggtggttccagtccagggtgtagacgatgccgggggcgccatccaccgcccaggcgtaatcgcaggcactggcaaacaggcctttggcatcggtcaccagccattcgggtgtggcgagcccggcttgcaagcgcgcggcctcaaggtgcagcaccagccgcgcccattcgaagccatggccgggggtgatgccgtaggggcggaagccatcggcggggttgtcttcgttgtagccgagcaagggctgccaggtggtgtcgaaatgctcgatgaccatgtactggttgccggcggcatgggtgtggatcacacgttcgacgatgcgcagggcgcggtccagccagcgtgtatcgccggtcacatcggccagggccaggaacgcctcggtagcatgcatgttgctgttggcgccgcggtaggcttcgacgccgctccagtcctgggcaaaggactcaagcatcacgccctcctcctcgctccagaagaactggtcgatgatatggatggcgtcgttcagcaggttttgcgcgccgggagcaccggccaccaccgccgagctggcggccagggcgacaaaggcgtgcaggtaggcggccttgccacggttgccgtcgacggcatggggcgtggcgaaccagccaccgtgctcactgtcgcgcaacgggccgttgagggaggcaaccccgtgctcaatcagttcggcgtaaccgggcaaccccatggcgtgggccatggcgaagctgtggatcatgcgggcggtgttcatggtttcggcgcgggcatcggccggcaaccggcctttgtcgtccaggttgccaaagccgtcgggcagtcgagacgccttggcaaacgccagcaggcgctggccttcggcagcgagccagacgtgatgggcaggcgcgttcagccaactgctggcaggcagtggttgggtggtcatggggggcccttattattgtttgtgggatcaccggagtctaaacaagggcgcggtgggggcaagtaacgaaggggatgggaaatgtcaccgagtggtgacatttccatcagagactttattgcccgagcggggtgactctcgccggcgcgttgagctgttggttgagggtctgcacctggctctgcaaggtggtgatattgcgcgtggtctggatgcggaacacgtcgaactccttgttggtaggcccatcactgctggccgacgcgttgtcctgggcgctcttgagcaccacgaggtcctgttcgatacgggcgatggcggcgctggggttgccctgtttcttcaatgcggccacgtcggcggtcagttccttgatctcgttatcgcgcttggccgcgtcaccttgtgccgccttgagcgttgccacggcgtcggtcaacgcctggacctggccttgcagcttgctgttggcattggacaggtcagtggtgctggcggtcatttgcgccaggcgcttgtccagctcggtggcctggccggccacaccgacttgctgcttgccctgctccagcagctggctttcaagctgcttgatctgcagtttcagcgcttcgctgccgttgttgacgctggcctcgctggccaccaccttgccggaaatatcctgcaggcgccccgccgcttcttcgctgatgcgcgcaaagctctcctgggtggccaccaactgctggcccatcagggagatctgctggaagctccaccaggccaggcccgcaaaggcgatcagcagcgcaccgatcaaggcccacaacgggccggtgctggcgctcttgaccttgaccaccttggggttgcgcgaacgcaccgaggtggccggggtaggctcgaaatcatcgtcatccccgacatcggcccgcaggctgggaacgttgtcgaagtcgtctttagcatcgttacgcatgaatcaaccctgaatcggtgaggtggcgagcgacgggagtataaaccgcgttcccggcgctctgatcgacccggaacgccgaattcggttcccgaagtgttgcctgttgtgtgcttacttcaacccagggtcctgggccttccaccaactgcagaactcgtcgagggcggtccacaggctgacctttggctcgtaatccagataatgcctggcgcggctgatgtcgagggtgaaatctttgttcatcacttgcatgcccaggcgcgacaacgccggctccggacggcccggccacatcgcacaaaacgcttcgttgagcgccgccacgctgtaggacaaaccgtaggaccgataccgcgtcacctgcggtagctccatctggcgcatcacgtagttcaccacatcccacaccggcactggggtaccgttgctgatgttgtaggccttgcccagcgccgagcccgtggcgagcaggctgctgagcagcgcttcgttgaggttgtgcacactggtgaaatcgaccttgttgaggccgtcgccgacgatggccagacgattcttgcgctgcattttcagcaagcgcgggaagatactcatgtcaccggcgcccgtgacgaagcgcgggcgcagggccaggacttcgaggccgaactcctgggcaccgaacaccttctgctcggctaggtacttggtagcggcataggggtgtttgaagcgtttgggcacttgctcttcggtcaggcccagatgatcgcgcccatcaaaataaatcgacggcgacgacaggtgcaccagccggccgacacgctccttgaggcaggcttcgacgacattttcggtgaccagcacattgccctgatgaaagtcctgatacttgccccacaacccgacagcgccggcgcaatgcaccacggcttcgacatcgcggcagaggtcgcgcaccaggtcggcgtcattcaaatcaccctggataaactcggcgccgcgcctgaccaggtgctccacaccttcggcacgtcgcccgttgacccgcacgtccaggccctgctccagggcgaaacgcgcaaagcgcccgccgatgaagccgcttgcgccggtgaccagaatcttcatgtattaccccatgttctttcgtttttcatcgctgttgccttgacgcgcgtcatcactccaacggcaccaaccattggccacacgcctgggccagatgatcggtcaacaagcccagcagttgcccgccactgcgccaatgatgccagtacaacggcacatcgatgggcttatctggcaataactcgaccaagaggcccttttccagttggtcgcgtacctgcaattccggcaccaacccccagcccaggcccgcttccgtgaggcggataaagccttcggacgatgggcataaatggtgttcgaaaccgccatccacaccgagggatgccaggtagcggtgttgcaggaaatcatccggaccgaacaccaaggccggtgtgcgtgccagttggtcggcgcgcacgccgtcgggaaaatgccgggcaataaaggctgggctcgccaatgcccgataacgcatggcccccagcaacaggctacgcgccccggccaccgggcgctcgctggcgcagatgcaggccgccacctcaccggcacgcatgcgcttgagacctacagtctggtcctccaccaccagatccagcagcagatgctgctcggcgcaaaaaccactgacggcctcggcccaccaggtggcgaggctgtcggcgttcaacgcgatgcgcaggcgttcgggcatgccttcctcatccagggccggcacgtggctttgcaggtcgcgctccagcaagcgcacctgttgcacatggttgagcaggcgacggccaatatcggtgggcgtcggcggcgtggcccgcaccagtaccggctggccgatgcgcgcctccagcagcttgatgcgctgggagatcgccgactgcgacagccccagcacctgggcggcgcgctcgaagcccgcctgttccaccaccgccgccagggcggaaagcaatttatagtcgaacatcagtttctctaatgagcgatcagcaatattggtttttcttatacagcctgcgccctgagaatagccagcatcgcttctctctttacaaggaacctcccatggctggcgaaaccgccctggcaaccctgctgcgcagcatgagcccccatctgaatgacggcgactatgtgttctgcaccctgcccgatcagcgtatccccgccggttgcgaggtaatcggcagcttccgcgaacaggagggcctgaccctgatcgtcgaacgccaacaggcggaacgggctggcctggcctttgattacgtcgccgcgtggatcaccttgaacgtgcattcagccctggaagccgtgggcctgaccgccgccttcgccagcgcgctgggccaggccggcatcagttgcaacgtgattgccggctattaccacgaccacctgttcgtcggccgtgccgatgcccagcgtgccatgcacgtgttgcagcaactggcggcaaacgcggagtagaccctatgtggcagagctatctgaatggtttgctggtcgccctcggcctgatcatggccatcggcacccaaaatgcatttgtgttggcgcaaagcctgcgccgcgaacatcacttgccagtagccgcgctatgcgtggtgtgtgatgccctgctggtggccgccggggtgttcggcctggcgacggtactggcgcagagcccgatactgctggcggtcgcacgctggggcggcgcggctttcctgatctggtacggcgcctgcgcactgcgccgggcctgttcgaaacagagtctggatcagggcggcaacctgcaggtccgctcgctgcgcgcggtgatgctgagcgcactggccgtgaccctgctcaacccgcacgtgtacctggacaccgtgttgctgatcggctcactcggcgcccaacagaccgagcccggcgcctacgtggccggtgccgccagcgcatcgttcctgtggttcgccaccctggcgctcggcgcggcgtggctggcgccctggctggcacgcccggccacctggcgcctgctggacctgttggtggcggtgatgatgttcagcgtggcctatcaattgatcagtgcctgaggaatattccaaaacgctctggaacctctatcccacacagttgttgcgtggttttgccgcacccccggtgctatgatccggaccctgcgccgcaaagagtacaaactccccggcgcttgtttggccgcccgtgatcggccttgcgctcaccgcaactgacctgattaggagatttatcatggctttcgaattgccgccgctgccctacgcacacgatgccctgcagccgcacatctccaaggaaaccttggaataccaccacgacaagcaccacaacacctatgtcgtgaacctgaacaacctggtgccaggcaccgagttcgaaggcaagaccctggaagagatcgtcaagtcctcttcgggcggcatcttcaacaacgctgcccaggtctggaaccacaccttctactggaactgcctggcgccaaacgccggcggccaacctaccggcgcgctggctgaagccatcaacgctgcgttcggttcgttcgacaagttcaaggaagagttcaccaagacgtccgtcggcaccttcggttccggttggggctggctggttaaaaaggctgacggttccctggccctggccagcaccatcggcgccggcaacccgctgaccagcggcgataccccgctgctgacctgcgacgtgtgggaacacgcctactacatcgactaccgcaacgtgcgtccaaagtatgtggaagcgttctggaacctggtcaactggaagttcgtggctgagcagttcgaaggcaagaccttcactgcctaagcactgcttgcagtaaaaaaagcccggcaaatgccgggcttttttgtggttgaaatcaatgctggatagttggaactcactgacatgaatcggccacccagcacgtgagagaaataactctctcagttcatgcaggagagtacgcaatggatccgttatcgatagcgtcagctattacagggattgtgccgctgacaactaaaatcgccgatgtagtaggtaaaggtctggacttggcgggaaaaggcgttgacttatttagcaaggtgctggatttgaatagcaaagacgggaatgagccagcgagcaaaatctgcaacgacgttcatcagaagaatacggctcagattacttttaattcctaaaacatccttcaaccccgcgcgggatccgaaaatgcgttcgctttcgctttcgctcccgcccccttcactcgacagtgtccagattccttcaagccccaatgttcctttgactgccatgcccagattgccaatactcatggcatattgaaggccacccgcatgagacaaggaatgcccctttgaagctggaactcaaaaacagcttgtcggtgaagttgctacgggttgtgctgctgtcggcattgatcgtgggcgtcgcgctaagcgtggcgcagatcgtttttgatgcctacaagacgcgccaggccgtagccggcgatgcccaacgcatcctcgacatgtttcgcgacccctccacccaggccgtctacagcctggaccgcgagatgggcatgcaagtcattgagggcctgtttcaggatgacgccgtgcgcatggcgtccatcggccaccccaacgaaaccatgctggcggaaaaaagccgtgccttgcagcaagcgcccagccgctggttgaccgatctgatccttggccaggaacgcaccttcaccacggcgctggtgggcaaaggcccctacagcgaatattacggcgacctgagcatcaccctcgacaccgcgacttatggccagggctttatcgtcaactcggtgatcatctttatttccggggtgctacgtgccctggccatgggcctggtgctgtacctggtctatcactggctgctgaccaagccgctgtcacggattatcgagcacctgacgtcgatcaaccctgaccgccccagcgagcacaagatcccgcagctcaagggccacgagcgcaacgagttgggtctgtggatcaacaccgccaaccagttgctcgaatccatcgaacgtaacacccacctgcgccacgaagcggaaagcagcctgctgcgcatggcccagtacgacttcctcaccggcctgccgaaccgccagaaactgcaggaacaactggacaagatcctcatcgacgccggccgtcggcaacggcgcgtagcggtgttgtgcgtggggctggatgacttcaagagcgtcaacgagcagtttacctaccaggccggcgacaaactgctgctggccctggccgaccgcctgcgcgcccacagcggtcgcctcggcgcactcgcccgactgggcggcgaccagttcgccctggtgcaggccgatatcgaccagccttacgaggccgccgagctggcacaaagcatcctggacgacctggaggcagagttcgccctcgaccacgaaggcatccgcctacgcgccaccatcggcatcaccctgttcccggaagacggcgacagcaccgaaaagctgctgcaaaaagccgaacagaccatgaccctggccaagacccgttcgcgcaaccgctatcagttctacatcgccagcgtcgacagcgaaatgcgccggcgccgcgagctggaaaaagacctgcgcgacgccctcagccgcgaccagttccacctggtgtaccaaccgcagatcagctatcgcgatcaccgcgtggtcggtgtggaagcgctgatccgctggcagcatcccgagcatggcctggtaccgccggacctgtttatcccgctggccgagcagaacggcacgattattccgattggcgagtgggtgctggaccaggcctgccggcaattgcgcgaatggcacgacctgggcttcaccgacctgcgcatggcggtcaacttgtccaccgtgcaactgcaccacaccgagttgccacgggtggtcaataacctgatgcagatctaccgcctgccaccgcgcagcctggaactggaagtcaccgaaaccggcctgatggaagacatcagcaccgcagcccagcatctgctgagcctgcgccgttccggggcgttgattgccatcgatgactttggcaccggttactcatccctcagttacctgaaaagcctgcccctggacaagatcaagatcgacaagagctttgtccaggacctgctggatgacgacgacgatgccaccatcgtgcgggccatcatccagttgggcaaaagcctgggcatgcaggtgatcgccgaaggcgtggaaaccgctgagcaagaggcctacatcatctccgagggctgccatgagggtcagggttaccactacagcaaacccttgcaggcccgggagttggcggcatttctgaagcagtcggagcgtaacaacgcggtaattctttgaccggccaaaacgatactgaatatttcccgcgtataaccctttacacaaaatgcaaatctttcgcattatgtcgcagttttttgcgctccccccgcgcgccccatcaacaaccgaagcaggatgttcgccatgattcgtatgcccctggccaccgccagtctgctggccattgccatttctctcgccggctgtggcgaaggtaaagacaaggccgcagcgccacaggcgccgaccccggctgccagcactaccgctccagcggctgccacccctgccggccaggtcgacgaagcggctgccaaggccgtggtcgcgcactacgcagacatggtgttcgcggtctacagcgatgccgagtccactgcaaaaaacctgcagaccgcgatcgacgcgttcctcgccaagccgaacgacgaaaccctgaaagccgcacgtaccgcctggatcgccgcccgcgtcccgtacctgcaaagcgaagtgttccgcttcggcaacaccatcatcgacgactgggaaggccaggtgaacgcatggccgctggacgaaggcctgatcgactacgtcgacaagtcctacgagcatgccctgggtaacccgggcgccaccgccaacatcatcgccaacacccagatccaggtcggcgaagacaaggtcgatgtgaaggacatcactccggaaaaactcgccagcctcaatgagctgggcggttccgaagccaacgtcgccaccggctaccacgccatcgaattcctgctgtggggccaggacctgaacggcaccggcccaggcgccggcaaccgtcctgcgtcggactacctgacgggcgacggtgccaccggtggccacaacgagcgccgccgtacttacctgcgtgccgtgacccaactgctggtcagcgacctggaagaaatggtcggcaactggaaacccaacgtcgaagacaactaccgcgccaccctggaggcagaacctgccaccgatggcctgcgcaaaatgctgttcggcatgggcagcctgtccctgggcgagctggccggtgagcgcatgaaggtttccctggaagccaactcgccggaagacgaacaggactgcttcagcgacaacacccacaactcccacttctacgacgccaagggcatccgcaacgtctacctgggcgagtacacccgcgtcgacggcaccaaaatgaccggcgccagcctgtcgtccctggtggccaaggccgacccggctgccgacaccgccttgaaagcggacctggcggcgaccgaagcgaagatccaggtcatggtcgaccacgccaacaagggtgagcactacgaccagttgatcgcggccggcaacgatgcgggcaaccagatcgtgcgcgacgctatcgccgcactggtcaagcagaccggttcgatcgaagcggcagcgggcaagctgggcatcagcgacctgaacccggataacgctgatcacgagttctgatccaggtgggagggggcttgctcccgatagcagtgtgtcagtgaagcacgtgtttactgacacatcgccatcgggggcaagccccctcccacatttgactgcattgcctcaaccccggtttacatgccccgcaccccaggtagaatggcgcctctgccctatctcgagtgaatttcatggcgttgccgaccctgcgcatcatcggtttcatcatcggcatcttcctgatcactctcgcgatcgccatggtcgtgcccatggccaccctggtgatcttcgaacgcaccagcgacctgccctcgttcctgtgggccagcatgatcacctttctcgccggcctggccctggtgatccccggtcgcccggagcatgtgcacctgcgtccacgggacatgtacctgctgaccgtcaccagttgggtggtggtgtgtgtcttcgccgcgctgccctttctgctgacccagcacatcagctacaccgactccttcttcgaaagcatgtccggcatcaccgccaccggttccacggtgttgagcggcctggacaccctgtcgccgggcatcctgatgtggcgctcgctgctgcactggctcgggggtattggttttatcggcatggcggtagcgatcctgccgctgctgcgcatcggtggtatgcgcctgttccagaccgaatcttcggaccgctcggaaaaagtcatgccccgctcgcacatggtggcgcggctgatcgtggccgcctacgtgggcatcaccatccttggcagcctggcgttctggtgggccggcatgggcctgttcgacgcgatcaaccacgcgatgtcggcgatttccaccggcgggttctccacctcggatgaatccctggcgcactggaaacaaccggcggtgcactgggtagcggtggtggtgatgattctcggcagcctgccgttcaccctctacgtggccacgttgcgcggcaaccgcaaggcactgatcaaggatcagcaggtacaaggtttgctcggtttgctgatcgtgacctggctggtgctcggcacctggtactggtggaccaccaacctgcattggctcgatgccctgcgccatgtggcgctgaacgtgacctcggtggtcaccaccaccggtttcgcgttgggggactacagcctgtggggcaacttctcactgatgctgttcttctacctggggtttattggtggttgctcgggctcgacagccggcgggatcaagatcttccgtttccaggtcgcctacatcctgctcaaggccaacttgaaccagctgattcacccgcgcgcggtgatcaagcagaagtacaacggccaccgcctggatgaagagatcgtgcgttcgatcctgacgttttcgttcttcttcgccatcaccatctgcgccatcgccctggccttgtcgctgctgggcctggactggatgaccgccttgaccggcgccgccagtaccgtatccggtgtcggcccggggctgggggaaaccatcggcccggcaggtaacttcgccagcctgccggatgcggccaaatggatcctgtcattgggcatgctgctcggccgactggagatcattacggtctttgttctgtgtattccggccttttggcgtcactgacagccgaggtttccaacaaccgcgcccggtattcgccgggcgtggcatcgaaccagcgacgaaacgcacggaagaagttactcgggtcggcaaaccccagcaggtaggcgatttccagcaaggtcatgctcggctgcgccaggtattgctcggcgagttcgcgacgggtgtcgtcgagcagggtctggaagctggtgccctcctcctgtagccgccgctgcaaggtgcgttgtgacaggtgcaacgtctgcgccaccacttcacgcttgggctcgccctggggcaacagccggcacagcacttgccgcgccttgtgggtcacgcggctttccgagaaacgcgccaggtattcaccggcaaatcgatcatgcaacagcgccatggcctcgttggccgtgggcagcggcgcttccatgtcggcccgctcgaaaatcaacgcgtcgtagggtgcgttgaactccaggggtgcgtggaaggcttgtttgtagggtgccaggtccgccggctgatcaccttgcagcaccaccttgcgcggctgcagggtgcggccggtgagccagccacacagcgccagggcactggccaacgaggcttcggcgctttgccgggttggcggcaggtgatcgccatgcaccgtcagaatcagcgcatacccttcggggatcagtcggaaactcaggtcggcactttcagcgatgatgcgctggtaacgcaccaggcgcataaaaccctcggcgagggtgttgctggacatcagcgcatagcccgccacatgaaacgacgccgggcgcaccaccttgcccatgttcaggccaatcgccgggttgcccgacagctctaccgcgcgctgccataggcgggtcatgcaatcctgcgggaaccgcgcatcgggatcattcagggcggcgtagtccaggcccagttgcttgaacaaggcgcggcaatccaggccgtccatttccaatgccttgactatccccatcgcccagcttgcagaagttgttcgttcgctcatggcgtcttcttaataaagcaggctcaaacgacagccaggaagccaaggatactaaagtggcatctattgtcactggctgttactactgatcactctagactcaaataagctccccgccgaacatctgttgggcggcataaccaccaaagggccggccactgtggaaaacgtcaagcgattcaatagctttgctgagttctacccctattacctggccgagcacgccaacagtacctgccggcgcctgcatttcatcggtaccacgctggtgatcggcattctggcgtatgccatcggccggggttcgttgggcttgctgatcgccttgccgattgccggctacagctttgcctggatcggccacttcttcttcgaaaagaaccgcccggcgacctttcagcacccgttttatagcctgctgggagactttgtgatgtaccgcgacatgattctgggcaaggtgccgttctagccgaacgaccgtttaaacgatgaaagttcatccatccggcgacataaaaatctttttgtcatttgcggtgctgtatcctgccaaggctttttgagagcgcggaatcacctgcgattgaaaaaacagaccttgcgaggagcgacgacgatgcacgagatacctaatctccccttcccaagcctgcaccctacagagcagccaacaccgcagcaggccagcgacaaacagcctgaggccaaagaagccaaaccagtcgacagcaaaagccaggactgacgccgtaacagaccgtgtggaaagcgcaacgttgagcgctttccacactgcctgaatcaatcgagacgcccatcatgaccgataccctccccgacaccccggataccgccgtactcgacgctgccctgcagatggtcgaggtgtggaaccgcctcagcgcggagaaacaggccgtactgctcaagcgtttcggcacccaggaaaacgcgctggccgccctggtcaccacccaactgctggcccctgcgcgcgcctgacgtctttttgatccgaggtttttgtgttttagcgccctgcgcgaagcaaaccaccggtatcattagcagcctatctttacctgctgcgacagtggacctctcccatgcccgatatccagcgccccatggcggtcacgctgcaagttgtttccatcgtcttgttcaccttcatcggctacctgaatatcggtattcccctggccgtgttgccgggctatgtccacagtgaactgggctacggtgcggtgattgccggcctggtgatcagcgtgcaatacctggccaccctgctgagccgcccgtacgcgggcaagatcatcgacaacctgggcagcaaacgcgccgtgctgatcggcctggtcggctgtggcctgagcggcgtgttcatgctgctcgctgcgtggttctccagcctgccagccttgagcctgggcagcctgttgatcggccgcctggtgctgggcagcgcggaaagcctggtgggctcgggtgccatcggctggggcatcggccgggtcggcgcgcagaacaccgccaaggttatttcctggaacggcatcgccagctacggcgcgctggcggtcggtgctccattgggcgtcgtgttggtgaagagtttcgggctgtggagcatgggggtcagcatcatcctgctggccatcgtcggcctgctgttggcctggaacaaggtcgccgcaccgattgtggccggtgtacgcctgccgttcatgaatgtactgggccgggtcttgccccacggctgcgcgctggcactgggctcgattggatttggcaccatcgcgaccttcatcaccctgtactacaccacccagcactgggataacgcggtgtgggccttgagcttgttcggcgccagctttatcggcgcacggctgttgttcggcaacctgatcaaccggatcggcgggtttcgcgtggcgattgcctgcctgtcagtagaaatctttggtctgctgttgttgtggctcgcgccggatgccagtttggccctggccggtgcggcgttgagcgggtttggcttttccctggtgtttccggccttgggcgtggaagcggtcaacctggtgccggcgtccagccgaggctcggcggtgggcgcttactcgctgttcatcgacctgtcgctgggcatcaccggcccgctcgccggggccgtggcggcggggtttggctttgcgtcgatcttcctgttcgccgccctcgccgccttgggtggcttgctgctcagtgtttacctgtaccgacaagcgccgaaagcccgtgaggcacgcggcgactaaaagtcgaccttgccacgcccggccttgatgctgccgcgcttggtcttggattcgaggcgacgttttttcgagcccagggtcggcttggtcgggcggcgcttcttctccaccttggtagcgctgaggatcaactccaccaggcgctccagcgcatccgcgcggttctgctcctgggtccggtattgttgcgccttgagcaccagcacgccttcactggtgatgcgactgtcgcgcagcgccagcaaccgttccttgtagaagtccggcagcgacgatgcgggaatatcaaagcgcaggtgcaccgcactcgacaccttgttgacgttctgcccaccggcgccctgtgcgcgaatggccgtcagctcgatctcggcgtcgggcaggtggacgttggtggaaatcaccagcatgagcagcaggcacctctaaaggggggaagcccaaggatacgcgaatgcgccctccgccatccctccaagcaacaaacccggcacatggccgggtttgcttgatcacactttacgcttacttgaccgctggcactgccgcatccaaggctcgctgcgcactgcgtttgttcttgattgcgtaacacaccgccataaacgccacccacaccggaatcgcatacaccgacacctggatgcccggaatcatcagcatgatcaccaggatgaacaccacgaacgccaggcacacgaagttgccgtaggggtaccacaacgccttgaacagcggcacctggccagtgcggttcatgtgctggcggaacttgaagtgggagaagctgatcatcgcccagttgatcaccaacgtggccaccaccagggacatcagcagttccagcgcgtgctgcggaatcaggtagttcatcaacaccgccaccagggtgatcgccgccgaggcgaggatggaacgcaccggcacgccgcgcttgtcgatcttggccaatgccttgggcgcatcgccctgctcggccatgcccagcaacatgcggctgttgcagtaagtgccgctgttgtacaccgacagcgccgccgtcaggaccacaaagttgaggatatgcgcggcggtgttgctgcccagcattgagaacacctgcacgaacgggctgccactgtaggcgtcgccagaggcgttgagggtttcaagcaggctgtcccatggcgtcagcgacaacagcaccaccagggcaccgatgtagaaaatcaggatgcggtagatcacctggttgatcgccttcgggatcacggtgcgcggcttgtccgcctcagcagcagtgaaaccgagcatttccaggccgccgaaggagaacatgatgatcgccatggccatcaccaatccgccgacgccgtggggaaagaagccaccgtgttcccacaggttgctgaccgacgcctgcggcccgccgctgccgctgaccagcaaatagctgcccagggcgatcatgccgacgatggccaccaccttgatgatcgcgaaccagaactcggcctcaccgaacactttgacgttggccaggttgatcaggttgatcagcacgaagaacgccgcggccgaaacccaggtcggaatctccggccaccagtaatgcacgtatttgccgacggccgtcagctccgacatacccaccaggatgtacaaaatccagcagttccagcccgacaggaagccggcgaaaccgccccagtacttgtgggcaaagtggctgaaggaaccggcaaccggctcttcgacgatcatttcgccgagctggcgcatgatcatgaaggcaatgaagccgcagatggcataacccaggatcatcgacggcccggctgatttgagcaccccggccgagccgaggaacaggccggtgccgatggcgccaccgagggcgatcaactggatatgtcggtttttcaggccgcgtttcagctcgcctgaagaggaatggggtccactcatgaaaagggtctcacgcaaggtttgagaagattgattgcaggttgctgccttgaattaccgactcaagcagcgccgctcaaaccccagcgcaggcaccaggagtacagcgtctttctaacggtcatgcgtcacctgtttgtttttatctgtgacgaaatcgaacccgtccggctcgtggccaggcggagtgatcagggtgggtacaccctgaggtcttggcctttagcgtggttacgcaagggggtcacagtaaaacgcggcgcattgtacaccgctcgaccgcttggggccgcccgccaaaagcgtgtgcgacgatctgtcaggtaatccttacagcgcaagatcaaccaataatgtcgccatttacgcgtaaattaatcgttacagcatggaaaattcacgttacagccgtgatctgaataaaaaatgacggtcagaaatttcctgcaattcagcgctgccagttgtctgtttttcctcaagaaacaatcaaacaccaaaaacagaacaaaaaatccaaatgaaaccgtgtcaataaaaattttgcattttgaaacactctctcctaggttctttgcacttgcccgcgaagcccgttggcaagccgttctcaaacaccgtcctctaggagatacaccatgcaagcactggaaaacgacctggaaaccgaactgcaactcgacgactggtttgaagcgccgacccatgaggccgccgtagaaatgatgcaagccgacgctgttgtgccatttggcacagcgatgtggcccttctaaaaaccggcacgctcccggcaggtgccgtgcacggcacctgctcccttacccaaggcacagaaggacgcacgtcatggacaaggcccgcgccgtcgaacattttctctactacctcgcgcaccacccggccctcaatggcctgagccgccccaccgtgctgctgggccataccaagcgctacgacgccatcgcccagacgatcacccagggcagcgccgcccctttcaacttccaggtgcagcgcctggacctggccgccagcgacaccctggctcaggccatcgaagcctgcgacctgtacctgtttctctacgactcctccaccttgcccaaccctcgcgccgaaggcccggactttatccgtgccctgcaaggcgtgatggccgaacactggaaaaaatccctgctgttcaaggattatggcgactatttctatgacaccttcagcgtcgagccccaacgcattgccgacctcaatgccacgctgatccggcgcatgtcccaggccaacgtgctgagctttaccgacaaacatggctcacggctggaagcgccgatgagcagcatcaagaagtggaccaatatcaatggggtcggcaaccacgatctggccccgggcgagatcgccacccacagtgaggctatcaatggtcaggtgcggtttgtcggcacctttctcagcaccatcccgtttgcgcgcaaatatggtgtgctgcaatcgccgctggagttgtggatcgagaactcgaccatctgcagcgtggccagtgaagtgccggggttggccgatgatttcaacaagtacctgaatgccaacccgtcgaaccggcgtgtggaagagttggggattggtaccaatgaaggggtgaaggatctgtatgcgcgcaacgccgggttcgaggagcgccattgcgggttgcacctgggcttgggcggtgggcagaaaggcagccatcacctggatttgatctttgccagtggggtgttggcgctggatgacaagccggtgtttgatggggcctttgcgttctgagcaaagcgttaactaacgctgaaaatctgaatgtgggagggggcttgcccccgatggcagtcggtcagttgatgtgtgtggtggctgccacaccgttatcgggggcaagccccctcccacattttgaacgtattccaaggcaaaaaaaaacgccaacccgagggttggcgttttttatgcggcgatcaaatcactgcggcttcttgcggccaaaaccaggacgctggccggaaccggccggggcgccacggcgcttgccagacggctcgtccgcgaccagtttcgggccgggacgcttgttagcggcaggcttggctggacgcttggtgctggcgttgtcggccgggcgatccgcttcaccccggttgctgcggccacccgatggggcaggacgcggcgcacgtggcgcacgctcgccttcctgacgcgacggcgcggttgggcggcgctcaccttcgatctgcggctcacgggaaatacgaccgccggtcgccggagcattcaacgccgggcgcagggtgcgggcaacccgctcggtgcgcgccaccgggcgcgacgatttacgctgcatacgctcaagcttgtctttgctcttggcgttcatctgcggcatcgccaccggcgtcaggccgacttcggcactgaggatgtcgacttcgtactggctcatttcgcgccagcggcccatcggcaggtcggagttgaggaataccgggccgaaacgcacgcgcttcaggcggctgaccaccaggccctgggattcccacaggcgacgcacttcacggttacggccttccatcaccacgcagtggtaccagtggttgaaaccttcaccacctggcgcctgcttgatgtcggtgaacttggccgggccatcttccagcaccacgcccgccttgaggcgctcgatcatctcgtcgtcgacttcgccgcgtacacgcacggcgtactcgcggtccatctcgtaggacgggtgcatcaggcggttggccaattcaccgtcggtggtgaacatcagcaagccagtagtgttgatatccaggcgaccgatgttgatccagcggccttctttgggcttgggcatcttgtcgaacacggtcggacggccttccgggtcgtcgcgggtgcagatctcgccatcgggcttgttgtacatgatcacgcggcgcaccgattcggcggcctcttcacgcttgatgaccttgccatcgatggtgattgcgtcgtgcaggtcgacgcgctggccgagggtagcctcgacgccgttgaccttgatgcgcttctgggtgatccaggcttcgacgtcgcggcgcgagcccacgccgatacgcgccagcaccttttgcagtttttcgcctgctgggccgatttcctggctgtcgttctggtctttgtcgttcatcttaagcacctcccggtgggtcgattcaggcgtggcctgaagagtgttgaaagcggggctttggccgaatagctcggcaaagggtcgcgaatcatacgcgcatggcgcgcgttgcgcatcagagactagtcgattagtggccggcaatcggtttttccgccgaccggtgggccatgtgggatccgggtcaatcttcgaactggcgacgctcggcctcgatagcttcggccagggcccgggcttcgtcttcttcgtcgctcagcggcggctgttcgagggcggcgacggcggccaggagtttttcacgggcttcggcgacgccgaggatgtcttcttcaggttcgggctcaggttcagggtcaacggtttcctggggttctgcctcagtcgcaccatcgcgcagcaagtcatcaaagtcggtcttgatgccctgctccatgtcgtccagttccagcagcaaggtgtggaagctggtttcgtccttcggttcttccggctctgctgtcgcatcggcgagctcctgcaggctggccggcaccggggcatcgtcgaagtcgagcaccggctccgcttccatttcgcgcaattcggccagcggcggcaagtcgtcgaggtttttcaggttgaaatggtcgaggaacaccttggtggttgcaaacatcgccggtttgccgggcacgtcacggtaaccgacgatgcggatccactcgcgctccagcaacgtcttgacgatatggctgttgaccgccacgccccgcacgtcctcgatctcaccccgggtgatcggctggcgataggcgatcagcgccatggtctccagcatcgcccgagaataacgctgggggcgctcttcccacaggcgtccgacccaaggggaaaatttctcacgaatctgcaggcgataacccgacgccacttcgcgtaattcaaaagcacggccgtcgcaggatttgcgcagaatctccagcgccttcttgaacaccggcggctcgggacgttcggcctcttcaaagagctcgaacaaacgctccagggattgcggtttgcccgacgccagtaggaaagcttccagcagcggtgccagttcgcggggttcagtcagattcatcgattcagctctttattcggctcgcgcccgcacgtggatagccgcaaaaggctcattctggaccagctcgaccaacgactccttgaccagttcgaggatcgccataaacgtcaccaccacccccaggcgcccttcttcggcggtgaacagctcgacaaacggcacgaagccgccgcccttgaggcgctccagcacgtcgctcatgcgctcgcgggtggacagcgcctcgcggctgacctggtgactttcaaacatatcgccccggcgcagcacctcggccatggacatcagcaattcttccaggctcacgtccggcaacagtttgcgcgcacgggcctcgggggcatccagcttgggcaccacaacgtcgcggcccacccggctcaggccatcgatgccttcggcggcggccttgaagcgttcgtactcctgcaggcgtcggatcagttcagcgcgtgggtcgtcttcttcggcctccaccgtctccgagcgcggcagcagcatgcgcgacttgatctcggcgagcatggcagccatcaccaggtactcggcggccagctccaggcgcaccgactgcatcagctccacatagcccatgtactggcgcgtgatttccgccaccggaatatcgaggatgttgatgttctgcttgcggatcaaatacagcagcaaatccagcgggccttcgaaagcctccaggaagacttccagcgcgtccggcggaatgtacagatccaggggcatttccatgaccgcctggccgtacaccatggcaaacggcagttcctgctgggcgcccgcctggctgtcgacggtttccacggctgacattcaggcctcgaccatgaacggcgccgggtcgccgcaacccacgcggatcacttcgggttcgccgtcggccaggttgatcacggtggaagctttgccgccgccgaaaccgccgtcgatgatcaggtccacctgcttttccaggagctgacgcatttcatacggatcttccaggggatgggtgtcgccgggcatgatcaacgacacgctcatcaacggctcacccagttcttcaagcagcgccagggcaatgggatgctctggcacccgcaggccaatggtgcgcttcttcgggtgcagcagcaggcgcggcacttcgcgggtggcattcagaataaaggtgtagggccccggcgtgtgagccttgagcaggcggaaggtgccggtgtcgaccttggcgaacagccccaactgggacaggtcactgcagatcagtgcgaagttgtgcttgtcgtccaactggcgcaggcgtcttacccgctcgacggcgcccttgtcgccgatctggcaaccaatggcgtaggacgaatcggttgggtagatcaccacgccgccggcgcggatgatctcgacggcctgtttgatcaggcgcgcctgggggttttccggatgaatctggaagaattgactcacgtgttctacctgttcagacggtggcaataatggggtcatgcttgaatcgcccccacaagagcggcaaatcttccgggacggggcgatactcgccgatctcggaccagccgcctgggccatgaaaatcactgccggcactgaccagcagaccaaattcgcgggcaagaatcgccaggctgccgacctgctcggcgggttgatgcccgttgaccacttcgattgcgtggccgcccgctccaatatagtcggcaatcagcttgcggcgcttgctgcgggtgaaatcgtagtgccagggatgggccaggctgacccaggccccggaggcccgcagggtctcgacggtgtcctccagggtcggccagtgttgcttcacatcacccaacttgccggcgcccagccatttgcggaacgcttcggcgcggtcctttacaaaaccttcacgtaccatccagtcggcaaagtgcggccgcgcgggtgcgttgccgctgtcacccagttcctgctggatggcgcgggcgccttccagggcaccggacatgcctttaaggccgagcttgcggcttatttcttcggaccgcagccagcggccatcgtgcaactgggcaatggcggcgaccaaaggcggggctttttgatcaaagccgtagccgagtacatgaatggtggcgccaccccaggtgcaggacaactccacaccgttgaccagctgcatgcccaacgcatgcgcggcttcgcgggcttcgtcgaggccttcgagggtgtcgtggtcggtcaacgccaggactcgcacgcctttttcaaacgcacgcgcaaccagtaacgcaggcgccagggcgccgtcggaggccgtgctgtggcagtgcaaatcaacattcacggggatgtgtaacctcaagtcagctggcgctttcgctaccaaggatgtttgttattatgccgccacatccagcttctggctcttactgtgaaacaattcatcgacttcatcccgctgttgctgtttttcatcgttaccaagctcgaccccagggtcatcgaaatcgccggtcatgcgttctcgttcgggggcatctacagcgccaccgccgtactgatcatcagttctatcgtcgtctacggcgccatcttcatctcccagcgcaagctggaaaaaagccaatggctcaccctggtcgcgtgcctggtattcggcggcctgaccctggccttccacagcgaaaccttcctcaaatggaaagcgccggtggtgaactggctgttcgccctggtgtttatcggcagccacttcatcggtgaccgcctgttgatcaagcggatcatgggccacgcgctgaccctgccggatccggtgtggacacgcctgaacgttgcgtggatcgtgttcttcctgttctgcggcgccgccaacctgttcgtggcctttaccttccaggactactgggtcgacttcaaggtcttcggcagcctggccatgaccgtgctgttcctggtcggccagggtatctacctgtcgcgccacctgcatgacgtcgcccctaccaccccgaaaaccgaggattgacatgctctacgccatcattgccaccgacgttgccgactcgctggaaaaacgcctgagcgtgcgcccggcccatgtcgagcgcctcaagcagttgcaggccgaaggccgtatcgtgctggcgggtccacaccctgcggtagacagcaacgacccaggcgacgccggtttcaccggtagcctgatcgtcgccgagtttgcctccctggccgatgcccaggcctgggccaaggctgatccttatgtagctgccggcgtttacgccgacgtcgtgatcaagccgttcaagcaagtcctgccttgataacggccacgccgaacctaatcggttcggcgcgctcctaattgctcattattctcggtaacctgccgacaacgttctgaatattcgtgtggaatcaggagttccgatgcgcttacgtcagttgtgtctgttggcagtggtaatgatcggggctacggcccacgctgaagaaacctcgaacaccggcagttccacgcctctgtccttgagtgccggcgcccagatcaccgagttgcagcagcggttgaaagaaagcgaacgccagcgtgaagaattgagcaagcaactgcaaaacgtagatgctacccgcgaaagcgcccaactgagtcgccttcgccaagagaaccaacgcctggcccagcaactcaaagaaacacagggcggcgccttgacccgatggctgaccgagcagcaacaatggttcgtcaccggtggggccgtggcgctgatcgccttgctgtgcgggatcttcgccagcggtgggcaccgtcgccgtcgacaatggctaaattgagtgagtcatgagcgagctgttactgatagatgatgaccaggagctctgcgagctgctgaccagttggttgagccaggaaggcttccaggtacgcgcctgccatgacggtttgagcgcccgcaaagccttggccgacagtgccccggccgcagtggtactcgacgtgatgctgcccgacggcagcggcctggaactgctaaagcaattacgcaacgaccacccggagctgccggtgctgatgctgtcggcgcgcggcgaaccactggaccgcattctcggcctggaactgggtgccgacgattacctggccaagccctgcgacccacgcgagctcaccgcacgcctgcgcgccgtgctgcgccgcagccacccggccgccgtgtccacccagctcgaattgggcgacctgtgtttcagcccggtgcgcggcgtggtcagcatcgatgaacaggaattttccctcaccgtctccgaaagccgcctgctggaagccttgctacgccagcccggcgagcccttggacaaacaggaactggcgcagatcgccctgggccgcaaactgaccctttacgatcgcagcctggacatgcacgtgagcaacctgcgcaaaaagatcggcccgcacccggacggccgaccacgcatcgtggcgttgcgcagtcggggctactattacagcctttgaagcagctatcagttgccgccttccccttaccaaacctttaccctctcctgacggcggctgaccttgatctccgtaatctactcacatccggactcaccggaatagagacaggagaatcaccatgcgcaagacccttatcgctttgatgttcgccgctgccctgccgaccgttgccatggcggcaatgcccgaaggcccaggcccgatgggcggccccgaaggccatatgatgggtggcccgggtcacgacggcgaacacggtccgcgtggcaaaggcggccccttcagccaactggacctgagcaaggaacagcgccagcagatcggcaaactgatgggcgaccaatggcacgctcgcaaggacctgaccagaaagtacctggacaagctcccggctgctgaccagaaggccatgcaggacgaaatcgccgccggcaagcagaaaacccaggcggatatccgtgcgctgctcaagccagaccagcagaagaaattcgacgagatcgtcaagcagcaggaacagcgccgcgccgaatggaaggaattccaggcctggaaagcgcaacagccgcaaaaagcgcaataatgccctcgcgttaacgctcccagcccagtggcccccgccactgggcttttcctgcttgagggtttcctgtgcgttcattgttctggcgcatcctggccagtttctggctggccatcgccttggttgccgggttgtcgatcctgcttgggcatatgctcaatcaagatgcctggattctcagccgtcaccctggcctcaacaacctggccgaagagtggacccaactctacgaaacccagggtgaggacgctgcccaggagttgctgcaacagcgcaaacgccagtaccacatcgacgtgcaggtgctgaacgaaagcggcgagccggtggtgcgcggcaccttcccacgccgcgccgccgccttcgaagcccgccagaacgatagcaaggacggccacctgccctggcgccgcctgaccgctgaatacaccagtgagaagaccggcgacacttacctgttgatctaccgcatcccgcacccggaactggacgaatggcatcgcagcagcctgacatggcctttgagcgcattggtcatcgccttggtggtgctgaccctgttcagcctgttcgtcacactgtccatcacgcgccccttaagccgactgcgcggcgcagtgcatgaccttgggcaagccacctaccaacaaaacagcctggcgcaactggccaaccggcgcgatgagttcggcgtactggccaccgacttcaaccgcatgggcgcgcgcctgcaaagcctgatcggcagccagcgccagttgctgcgcgacgtgtcccacgaactgcgctcgcccctggcccgcctgcgcatcgccctggccttggctgaacgcgccagccccgaagaacgcgaaagactctggcctcgcctgacccgcgaatgtgatcgcctggaggctctgatcagcgagattctggtactggcccgcgtcgatgccgataacgccagcgccgaagaaatcgacctcaacccgttgctcaagaccctgcaaaaagacgcacagctcagcgcgccggatcaggtggtgcagctcaccaccgacaccgaactgcacctcaaggggtggccgaccatgatcgaacgggcagtggataacctgctgcgcaacgcccagcgcttcaacccgccgggccagccgatcgagctacacgcccaccttcacggcgagcatattgtgatcagcgtgcgcgaccacggccccggcgttgacgccgaacacctgagccaattgggcgaaccgttctatcgcgccccaggccagaccgcacaaggccacggtctgggcctggcgattgcccgtcgcgccgccgagcgccatggcggcaacctgttcctggccaatcatgcccaaggcggttttatcgccagtatcgatctgccgctggaacctgggattgtcacaccggcctgatcatcttctatagtggcccttctcttacggagggccgttgatgactgacctgctgactcccatccaagccgcactcgatctaccgcgcacgccgctgaccagcaccgaagccggcgccctgccctcggcctttgccgtcaccgacctggcggttgccagtatcggtgccgccggccaggccgtggcccagttgatcctgcaacagaccgggcgactgcccggcgtgagtgtggaccggcgactggcgtccttctggttctcgtcatcgattcgcccgataggctggaaaacgccaccgctgtgggacccggtggccggtgactacgcctgcgccgatggctggattcgcctgcacaccaacgcgccccatcaccgcgccgccgctgaacgggtactgggcaaggtggctgatcgcatcgcgatggccggcaaggtagccaattggaatgccgccgaactggaacaggcgattgtcgatgaaggcggttgtgccgcgcagatgcgtacctggcaagcctggcaaacccaccctcagggcctggccgtcaatgccgaggcactggtgcagcgccagaccttggcaacctccgtcgacaaaccctggctcggctcggtggcgcgtccactggcgggcctcaaggtattggacctgacccgcgtgctggccggcccggtggccagccgtttcctcgcagggctgggtgcggatgtattgcgcatcgactcaccgacctggaacgagcccggcgtagtgccggaaatgaccctgggcaaacgctgcgcccgcctggacttgaagagcgcccaaggccgcctggttttcgaaagcctgctcaaggacgccgacattgtgttccacggctaccgcgccgacgccctggaacaactgggctacagtgccagtgaactgcaaacccgcgcccccggcctgatcgacgtgagcctcaacgcctacggttggagcggcccgtggcgcaaccgccggggtttcgacagcctggtgcagatgagcagcgggattgccgccgcaggcatggcctggaaacacgcggacaaaccggtgccgctgccgttgcaggcactggatcacgccaccgggtatttgatggcggccagtgcgattcgggcattgagcgaacggttgaaaaccggccgtggcggttcggcgcggttgtcgttggcgcgtacggcgaagttgctggtggacgccgggcaggtgccggagcagccggcattgcgggccgagcaaccgagcgatcaaggcctggtagtggaacagacggcctggggccaggcgcatcgattgttgccgccggtgactatcagcggcacgccgttgcagtgggatctgccggctggggaactgggttcacaccgagcgcagtggtgactcgactatcgccatcgggggcaagccccctcccacatttttggatgttgttcacaaatcaaactgtgggagggggcttgcccccgatgaggcccgtaccgtcactatcaatccacccgttgcaacgaagtccacaaatgctgcgccgcatacgcccgcaacggccgccacgcctcggcccgcgccagcaactgccgcgccgacaccggcccgccctccaacgccgccagcgcattgatcaagccgatatcccccgacgcaaacgcatccgtctcgcgcatctggcgcatggcgatgtattgcgcggtccagtcgccaatccccggcaacgccaccagccgggccacaccatccttgaggctggccttggcttcgaacagctgagggtcatccagcaacgcctgcgcgacgccggacaaggtccgtccacgcgccttcggcatgcccagggtggccaggtccgctgccgccaatacttcggccgaggggaacacatgggtgataccgacgtacggcgtctccagcggctggccatattgcgccaccagcttgcccgctaggcgaatcgccgccaccacggtaatctgctggcccagcaccgcacgaatcgccagttccaggccatcccaggtgcccggcacgcgcaggcccggacgggccgcgaccaactgcgccatcaagggatccgtcgccaattgcgggttgatcaactggggctgcgcatccagatcgaacatcgtgcgcaggcgccgttcgatctcaggcaacgccgccgggtctggaaaacccacctcgacgtctagccaatcgccatcccccagtgccacgctgatccagccgtgctgcccgccgaggctgatactgcgccggtacacccccgcctcgaccgtctccatcccgccgatcgcccgcgccgacagaaaccccaccatcgccgcccaatcataaggcggctgatacgccagtctcacaacgacaacaccccgctgtacagcccatacgccgccagccccgcgccggtgatcacacagctgaaaatgcctttttccatgtgggtaaacaagggctggcgctgctcacgcttggcgagggcaaacaggatcacccccggtgcatacaacagcgccgacagcagcaggtacttcaagcccccggcatacagcagccacacggcgtagccgagagcgatcaggcccaccagcaagtccttcaaacgctggccgtgggcgtcttcgtaggtttcgccgcgcccgctcaacagcacggcatacgcggccgaccacaggtagggcaccaggatcatcgatgaggccaggtaaatcagggtcgtgtaggtgctgtgggaaaacagcgtgatcaccaggaagagctggatcatcacattggtcagccacaacgcgttgaccggcacttgattggcgttttccttcttcaggaacgccggcatggtcttgtcatgggccgtggcgtagaggatttccgcacaaagcagcgcccaggacagcaaggcaccgaccagtgacaccgccaggccgatgctgatcgccatcgccccccaggggccgacgatatgttccagcacgccggccagggacgggttttgcaattgcgcgagttccggctggctcatgatgcccagggacagcacattcaccagcaccaacagggccagcacgccgagaaaaccgatcagcgtggcgcggcccacgtccgagcgtttctcggcccgcgccgagtacacgctggcaccctcgatgccgataaacacaaacacggtgaccagcatcatgttgcgcacctggtccaccacgttgcccatattcgggttgcccaggccccagatatcgcgagtgaagatatccgccttgaacgccacggcggcgatcacgataaacatcagcagcggcacgatcttcgccaccgtggtgatctggttgatgaacgccgcctccttgatcccgcgcaacaccaggaaatgcacggcccacagcagcaacgaggcacagccgatcgccaccggcgtgttgccctggccgaacaccggaaaaaaatagcctagggtactgaacagcaacacgaagtaaccgacgttgcccatccacgcgctgatccagtagccccaggccgacgagaaccccatgtagtcaccgaacccggccttggcgtaggcatacacgcccgaatccagttcgggcttgcgattggccagggtctggaacacgaaggccagggtcagcatgccgaccgcggtgattgcccaaccgattaacacggcccccacctcggcgcgtgcggccatgttttgtggcaaggaaaaaatcccgccgccgatcatcgagcccaccaccagggcaatcagggcaccaagtcgcagtttctgggccggttgagacatgaacactcctaaatgaacaacaacttgagctgacaacggtgcactcggctaattaactcagcgagtgtagcgtttattagtgaaggcgataaaaccaggaggctcataacgcaatcgcatgtcaggcattcgagtttagtcttatttagaatttaaataccggattgtctgaccgttcgcgaaacgcctttcgaaatgtttgcatattcaagaatacggtctagcttaaaacctccatagcgctgactaaatgattaaccaaaaggaaagaatggctctgcgtcaatactttccgaggattcttatcgcccacgagtttccagcctaagtcattaattcacaatggaatgtgccaatgaagtgatctgagtcagctgtttgattagcgcacggatttattctgtggtctctcttctcctgcattggagttatgcgatgtctgaatctcccggaaaacttcgactgggcgcactggttgcacttgtcgtgggctcgatgattggcggcgggatcttttcactgccgcaaaacatggccgccagtgccgatgtcggcgcggtattgattggttgggtgattaccgccatcggcatgttgaccctcgcctttgtgttccagaccctcgccaaccgcaagcccgacctcgacggtggcgtatacgcctacgccaaggccggtttcggcgactacatgggtttctcgtccgcctggggttactggatcagtgcgtggctgggcaatgtcggttacttcgtgttgctgttcagcaccctgggttacttcttccccattttcggcgaaggcaacacgccggctgcggtgatcggcgcctcggtgctgctgtgggccgtgcacttcctggtactgcgcgggatcaaggaagcggcgttcatcaacctggtgaccaccgtcgccaaggtcgtgccgctggtgctgttcgtgctgattgcgctgttcgccttcaagctggagatcttcaccgctgacatctggggcgtgaaaaaccccgacctgggcagtgtaatgaaccaggtgcgcaacatgatgctggtcaccgtctgggtgttcatcggcatcgaaggcgcgagcatcttctcgtcccgtgcggaaaaacgctccgacgtcggcaaggccaccgtgatcggctttatcaccgtgctgctgttcctgatgctggtgaacgtgctgtccctggggatcatgacccagccggagctcgccaagttgcagaacccgtcgatggccgccgtgctggagcatgtggtgggccactggggcgcggtgctgatcagcgtcggcttgatcatctcgctgctgggggcgctgctgtcgtgggtgctgctgtgtgcggagatcatgttcgccgccgccaaggaccacaccatgccggagttcctgcgcaaggagaacgccaaccacgtaccggccaacgccctgtggctgaccaacgccatggtgcagatattcctggtgatcacgctgttttccgccagcacctacctgtcgctgatctacctcgccacctcgatgatcctggtgccctacctgtggtcggcggcctacgcgttgctgctggcggtgcgcggcgagacctatgaaaacgccctgcgcgaacgcaagaaagacctgttcatcggcgccatcgccctgatctacgcggtctggctgctctacgccggcggcaccaaatacctgctgctctccgccctgctctacgcccccggcgcgatcctgttcgccaaggccaagcatgaactgggcaaaccgattttcaccaacgtcgagaagctgattttcgccgcagtagtcattggcgccctggtggcggcctatgggctctacgacggcttcctgactctgtaattctgactggaggatctgtaatgaccacggaaaaagtgaagtacggcgtacattccgaagccggcaaactgcgcaaagtcatggtgtgctccccaggtttggcccaccagcggctgacccccaacaactgcgatgaactgctgttcgatgacgtgctgtgggtggcccaggccaagcgcgaccacttcgacttcgtgaccaagatgcgcgagcgggacattgatgtgctggaaatgcacaacctgctcaccgacatcgtcgccatccccgaagcgctggactggatcctgaagcgcaagatcaccgccaacacggttggcctgggcctggtcgacgaagtcagctcctggctgcgcagcctggagccacgcaaggccgccgagttcctcatcggtggcgtctcggccgatgacctgccgagccaattcggcggcaagaccatcgaaatgttccgtgacttcctcggccatgccagcttcatcctgccgccgctgcccaacacccagttcacccgcgacaccacctgctggatctacggcggcgtgacgctcaacccgatgtactggccggcgcgacgccaggaaaccctgctggcctcggccatctacaagttccaccccgagttcaccaacgccgacttccagatctggtacggcgaccccgaccaggagcacggcgccgccaccctggaaggcggcgacgtgatgccgattggcaacggcgtggtcttgatcggcatgggcgagcgctcgtcccaccaggccatcggtcaactggcgcgcaacctgttcaagaacaaggcggtggaacgcgtgatcgtcgccggcctgccgaaatcccgcgcggcgatgcacctggacaccgtgttcagcttctgcgaccgcgacctggtgaccatcttccccgaagtggtcaaccagatcgtgcccttcaccctgcgcccggatgaaagcaagccacacggcatcgacatccaacgcgagaaaaccaacttcctcgaaaccgtcgccgcagccctcaacctcaaggcactgcgtgtggtcgagaccggcggcaacagcttcgccgccgagcgcgaacaatgggatgacggcaacaacgtggtggcggtagagcctggcgtggtgatcggttacgaccgcaacacctacaccaacaccctgctacgcaaggccggggtggaagtcatcactatcagcgccggtgagctcggccggggccgtggcggcggccactgcatgacctgcccgatcatccgcgacccaatcgactactaaggagactccatcatggctttcaacatgcgcaaccgcagcctgctgtcgctgatgcaccacaccacccgcgagctgcactacctgctggacctgtcccgcgacctcaagcgcgccaaatacaccggcaccgagcgtccgcacctgcaaggcaagaacatcgcgctgatcttcgaaaaaacctcgacccgcacccgctgcgccttcgaagtcgccgcccatgaccagggcgcccacgtcacctacatcgacccggtgtcgtcgcagatcggccacaaggaaagcatgaaagacaccgcccgcgtgctcgggcgcatgtttgatgcgatcgagtaccgtggcttcgagcaggaaatcgtcgaagagctggccaagttcgccggcgtgccggtgttcaacggcctcaccgccgaattccacccgacccaaatgatcgccgacaccctgaccatgcgcgagcacagcgacaagccgctgcatgacatcagctacgcctacctgggggatgcgcgctacaacatgggcaattcgctgctgatgatcggcgccaagctgggcatggacgtgcgcatcggcgcacccaaagcgctgtggccgcacgcggacttcatcaagcaatgccaggcgtttgccgaagaaagcggcgcacgcatcaccatcaccgaagacccgaaggaagcagtgaaaggcgtggacttcatccacaccgatatctgggtgtccatgggcgagccggtggaagcgtgggacgagcgcatcgagcaactgctgccgtaccaggtcaacgccaagatgatgaaagcctcgggcaacccacgggtgaaattcatgcactgcctgccggcgttccacaacagcgaaaccaaggtgggcaaggacatcgccgcgcggtacccgaacctggccaatggcgtggaagtgaccgaagaggtgttcgagtcgccggccaacatcgcgtttgagcaggcggaaaaccgcatgcataccatcaaggcgattctggtgtcggcactcgcagatatctaaaaaatgtgggagggggcttgcccccgatagcggtacatcagtaataaaagtgctggctgaaacaccgcaatcgggggcaagccccctcccacactaaccgcgttcacaacgatgaatttcatcagaaggacattctttatgcgcatcgtcgtagccctgggcggcaacgccctgctccgccgtggtgaacccatgaccgcggacaaccaacgcgccaatatccgcatcgccaccgaacagatcgccaagatccatgccggcaacgagctggtgatcgcccacggcaatggcccgcaagtcggcctgctgtcgttgcaggcagcggcctacacccaggtctcgccatacccgctggacgtgctcggcgccgaaaccgaaggcatgatcggctacatcatcgaacaggaactgggcaacctgctggacttcgaagtgcccttcgctaccctgctcacccaagtggaagtggacgccaaggaccccgccttcaagaacccgaccaagcccatcggcccggtgtattccaaggccgaagcggagaaactcgccgccgaaaaaggctgggccattgcgccggatggtgacaagtaccgtcgcgtggtcgccagcccacggcccaaacgcatctttgaaatccgcccgatcaagtggctgctggaaaaaagcgccatcgtcatctgcgccggcggcggtggcatcccgacgatgtatggggaagacggcaagctgcgcgggattgaggccgtgatcgacaaagacttgtgttcttcgttgctggcctcgcaactggaggccgatctgctggtgatcgccaccgacgtcaacgcggccttcatcgactacggcaagcctacccagaaggccatcggccaggcccaccccgacgaaatggaaaagctcggcttcgccgccggttccatggggcccaaggtccaagcggcctgcgagttcgcccgcaagactggcaaaaccgccgtcatcggttcactctcggacatcgaagccatcgtccagggcagtgccggtacacgcatcagtacggcaacacctggcatcacctatctgtgaagtagaggagagacgcctatggccacctttgaacccggtcacttacatgttgaacgtcacgcactgaatgcccaggactacagctacaacctgtgcatcgactacgaagtcagccaggacccaaaggaaggcaagggcatgctgttcaagctgcatggctcggtgcagggcaaggacctcaaggaagagttcttcctgcccaaggaccaggcattcgactttgcgcggcatgcgatgaacatcgcgcagaagtatgggatgccgaaagtcgcggtgttgaacggctcgatgcacaagcagtacgacttgatgttcgaggatgtgcggcatcaactggatgtgaaggccggggacccgatcaagccggaacacctggaataactggcacaactctgctccaactgtgggagggggcttgcccccgatagcggtgcatcagttacaaattggctgactgacacaccactatcgggggcaagcccctcccacattttgatctccaccctctgcaaggcatacttgctgcctctcgcgtcccagaattgtcagcagccccatgcgtatccacgtcagcttcatcgaccgcgtcggcatcacccaggaagtcctggccctgctcggtgggcgcaatctcaacctggatgcggtggagatggtgccacccaacgtctacatcgacgcaccgaccctcagcgccgaggtgctcgaagagctgcgcgatgcgctgttcagcgtgcacggcgtgcaggcggtgaccgtggtggacatcctccccggccaacgccgccacctgcaactcgacgccctgctggccgccatgaccgacccggtgctggcgctggacagcgcgggcaagatcctgctggccaacccggcgctgatcgccctgtacggccgcgaaccggccggcgaaagcatcagcgagctgtttaatgacccggcgctgctcgacaccttgctggaacacggctttcgcttgccgctgcgcgagatcagcgtcaacggccagaccctgctgctggacgccacgccgatcaccgacgcgggcgccttgctcaccctgtatcaacccaaccgcatcggcgaacaactgtcggcgctgcaccatgaccatgccgaagggtttgatgcgctgcttggcgagtccccggtgatccgcaccctcaaggcgcgtgcgcagcgggtggcggcgctggatgcgccgctgttgatccagggcgagacgggcaccggcaaagaactggtggcgcgtgcctgccacgccatcagtgcccgccacagtgcgccgttcctggccttgaactgcgcggcgctgccggaaaacctcgccgaaagcgaactgttcggctatgcgcccggcgcctttaccggcgcgcaacgcggtggcaagccaggcctgatggaactggctaaccagggcacggtgttcctcgatgaaatcggcgagatgtcgccgtacctgcaggccaagctgctgcgttttctcaatgacggcagcttccgacgcgttggcggcgaccgtgaagtgaaggtcaatgtgcgcatcctcagcgccacccaccgcgacctggagaagatggtcagcgaaggcaccttccgcgaagacctgttctaccgcctcaacgtgctcaacgtcgaagtgccgcccctgcgtgcacgcggccaggacatcctgctgctcgcccgctatttcatgcagcaggcctgtgcgcagatccagcgtccggtttgccgcctggcgcccggcacttacccggcgctgctgggcaaccgctggccaggcaacgtgcggcagttgcagaacgtgatcttccgcgccgccgccatctgcgaaagcagcctggtggatatcggcgacctcgacatcgccggcacctcggtggcgcgccagagcgacggcgaaatcgacagcctggaacaggcggtggaagacttcgagcgcaacctgctggaaacgctctacaccagctacccctcgactcgacaactggccagccggttgcagacgtcccatacggcgattgcccatcgtctgcgtaagtacggcattcccaacaagccttgagtgacatggttaaaaatgtcggagcgcattgcaatgttggtctgagaacgacatcgcgtgtactgaaagcgctacagcgtaacgatatcgctacaatcctgttttttgcgcgccatgcaaggctttgatccacataggctttttttcacaggcccaactgtagcgaaatcgctacaggcaaaatgcatatcgtcataaccaattttatcaagtcattgagttatataggattaatgacgttggccgcgatattgctaagcaactccccattattccaatcccgtccaccagacgaatctggccctgaggagtttccatgagcgagttgcgtttcactgaagatcacgaatggctgcgcgccgaagctgacggcagcgtcaccgtgggtatcaccgctttcgcgcagaacgcgctgggtgatgtggttttcgtgcaactgccggagttgcaggcctacgacaagggcgccgaggcgtccaccgtggaatcggtcaaggccgccagcggcgtgtacatgccgctggacggggaagtcctcgaagtgaacgacaagctcgacggcagcccggaactggtcaacgaagacccgatgggcgaaggttggttcttccgctttaaaccggccgatgccggggcagtcgctaaactgttggatcaggacgcgtacgatcgcctgatcaaagccaacgctgaagcttgaggagcgcgccatgaccgttaatctcaccaccgccaacgaattcatcgcccgccacatcggcccgcgccaggaagatgagcagcagatgctcgccagcctgggttttgactccctggaagccctgagcgccagcgtgatcccggaaagcatcaagggcaccagcgtgctcggcctggaagacggcctgagcgaagccgaagccctggccaagatcaaggccatcgccggcaagaaccaactgttcaagacctacatcggccagggctactacaactgccacacgccgtcgccaatcctgcgcaacctcctggaaaacccggcctggtacaccgcctacaccccgtaccaacccgagatttcccaaggccgcctggaagcgctgctgaacttccagaccctgatcagcgacctcaccggcctgccgatcgccaacgcctccctgctcgacgaagccaccgccgccgccgaagccatgaccttctgcaagcgcctgagcaagaacaagggcagcaacgccttcttcgcctcgatccacagtcacccgcagaccctcgacgtgctgcgcacccgtgccgagccgctgggcatcgacgtggtggtgggcgatgagcgcgaactgagcgacgtcagcccattcttcggcgccctgctgcaatacccggccagcaacggtgacgtgttcgactaccgcgaactgacggagcgcttccacgccgccaatgccctggtggccgtggccgccgacctgctggccctgaccctgctgaccccgccgggtgagttcggcgccgacgtggccatcggcagcgcgcaacgcttcggcgtgccgctgggctttggtggcccgcacgcggcgtacttctccaccaaggatgcgttcaagcgcgacatgccgggccgtctggtcggcgtgtccgtcgaccgtttcggcaagccggccctgcgcctggccatgcagacccgcgagcaacatatccgccgcgagaaagccacgtcgaacatctgcaccgcccaggtattgctggccaacatcgccagcatgtacgccgtgtaccacggccccaagggcctgacccagatcgcccgacgtgtgcaccagttgaccgcgatcctggccaagggcctgactgccctgggccagaacgtcgagcaaacccacttcttcgacaccattaccctgaacaccggcgccaacactgccgccctgcacgaaaaggcccgtgcccagagcatcaacctgcgcgtcgtggacggcgagcatcttggtgtgtcggtggacgaaaccaccacccaggccgatatcgaaaccctgtgggcgatcttcgccgacggcaaggccctgccggacttcgctgccaaggttgaaagcaccctgccgaccgccctgctgcgtcagtcgcctgtgctcagccacccggtattcaaccgctaccactccgaaaccgagctgatgcgctacctgcgcaaactggccgacaaggacctggcgctggaccgcaccatgatcccgctgggctcgtgcaccatgaagctcaacgccgccagcgaaatgatcccggtgacctgggccgagttcggtgccctgcacccgttcgccccggccgaacaaagcgccggctacctgcaactgacgtccgaactggaagcgatgctctgcgcggctaccggctacgacgcgatctcgttgcaaccgaacgccggttcccagggtgagtacgccggcctcctggccatccgtgcctaccaccagagccgtggcgaagaacgccgcgacatctgcctgatcccgtcgtcagcccacggcaccaacccggcaaccgccaacatggccggcatgcgcgtggtcgtcaccgcgtgcgacgcccgtggcaacgtcgacatcgaagacctgcgcgccaaggccatcgagcaccgcgagcacctcgccgcgctgatgatcacctacccatcgacccacggtgtgttcgaagaaggcatccgcgaaatctgcggcatcattcacgacaacggcggccaggtgtacatcgacggcgccaacatgaacgccatggttggcctgtgcgccccaggcaagttcggtggcgacgtgtcccacctgaacctgcacaagaccttctgcatcccccacggcggtggcggcccgggcgtcggtccgattggcgtcaagtcgcacctcacaccgttcctgcctggccacgcggccatggaacgcaaggaaggcgcggtgtgcgcagcgccgttcggcagcgcaagcatcctcccgatcacctggatgtacatcagcatgatgggcggtgcgggcctcaagcgcgcttcgcaattggcgatcctgaatgccaactacatttcccgtcgcctggaagagcactacccggtgctgtacaccggcagcaacggcctggtagcccacgaatgcatcctggatctgcgcccgctgaaggacagcagcggcatcagcgtggatgacgtggccaagcgcctgatcgacttcggcttccatgcgccgaccatgtcgttcccagtggccggcaccttgatgatcgagccgaccgaaagcgaatccaaggaggaactggaccgtttctgcaacgccatgatcgccatccgcgaagaaatccgcgcagtggagaacggcacgctggacaaggacgacaacccgctgaaaaacgccccgcacaccgccgccgaactggtgagtgagtggacccacccctacacccgcgaacaggcggtgtatccagtgccatcgttgatcgaaggcaagtactggccgccggtggggcgtgtcgacaacgtgtttggtgaccgtaatctggtgtgtgcgtgcccgtcgatcgagagctacgcataaccaaaggatgcattgggtacaaatgtgggagggggcttgcccccgaatgcggtgcatcagccacagataagctgactgacacaccgtcatcgggggcaagccccctcccacactagatcgagtcaactttcagaaaataataagaaaccggagaacaaccatgtcccttagcgtgttcgacctgttcaagattggcattggcccctccagctcccacaccgtcggcccgatgcgtgcggccgctcgattcgtcgagggtctcaagcgtgaccacctgctgggcgccaccacctgcgtcaaggtggaactctatgggtcgctgggcgccaccggcaaaggccacggcagcgacaaagccgtactgctgggcctggaaggcgaacacccggacaccgtgaataccgaaaccgtggcaacacgcctggcgcagatgcgcaaggacggccacctgaacctgctcggtgaacaccgcattgcgttcaacgagaaagaacacctggcgatgattcgcaaacccctcgcctaccatcccaacggcatgatttttcgtgccttcgacgccgcccacatccagatccgcagccgcgagtactactcggtcggcggtggttttgtggtggacgaagacgccgccggcgccgaccggattgtcgaagacgccacgcccctgaccttcccgttcaagcacgccaaggacttgctgagccattgcaccacttacgggctgtccatcagccaggtgatgctgaccaatgaaagcgcctggcgcccggaagcggaaacccgcgccggtttgctgaaaatctggcaggtgatgcaggactgcgtggacgccggttgtcgcaacgaagggattctgcccggtggattgaaggtcaagcggcgcgcggcggccctgcatcgccagctgtgcaaaaacccggagtcggcgttgcgcgacccgctgtcggtgctcgattgggtcaacctctacgccctggcggtcaacgaagaaaacgccaacggcgggcgcgtggtcacggcgcccaccaatggtgcggccgggatcgtgccggcggtgctgcattactacatgcgttttatccctggcgcgaatgaggacggcgtagtgcgcttcctgctcaccgcggccgccatcggcattctgtacaaagaaaacgcctcgatctccggcgccgaagtcggctgccagggcgaggtcggcgtggcctgttccatggccgccggtgcgttgtgcgaagtattgggcggcagcgtgtcccaggtggaaaacgccgccgaaatcggcatggagcacaacctcggcttgacctgcgacccgatcggcggactggtgcaggtgccctgcatcgagcgtaacgccatgggctcggtcaaggcgatcaacgcagtgcgcatggccttgcgcggcgatgggcagcactttgtgtccctcgacaaggtcatccgcaccatgcgccagaccggcgccgacatgaaaagcaaatacaaggaaaccgcccgtggcggtttggcggtcaacattatcgagtgctgacgcctaaaagcgcgccagcacgtttttcaggagctgaatatgtccaccaaaaccctgttgaaaacccctctgcacgccctgcacctcgaactgggcgcacgcatggtgcccttcgccggctacgacatgccagtgcaatacccgctgggcgtgatgaaggaacacctgcacacccgtgatcaagccggcttgttcgatgtgtcccacatgggccagatccgcctcaccggtgccaacgccgccaaggccctggaaaccctggtgccggtcgacatcatcgatctgccggtgggcatgcagcgttacgcgatgttcaccaatgaccagggcggcattctcgatgacctgatggtggcgaacctgggtaacgacgaactgttcctggtggtcaatgcggcctgcaaggaccaggacctggcgcacctgcgccagcatatcggcgaccagtgcaccatcgagccgctgttcgaagagcgtgcattgctggcgctgcagggcccggcggcagtcaaggtactggcgcgcctggcaccggaagtgaccaagatgaccttcatgcaattcgcttccctgcgcctgctgggcgtggactgctatgtcagccgttcgggctacaccggtgaggacggcttcgaaatctccgtgcctgccgccaaggcggaaagcctggcgcgcagcctgctggccgagaccgaagtacaggccatcggcctgggcgcccgcgactcgttgcgcctggaagccggcctgtgcctctacggccacgacatgaataccgacaccaccccgatcgaggccagcctgttgtgggctatctcgaaggcccgccgtgccgacggtgcgcgtgccggtggctttcccggtgccgacaccatcttcacccagcagcaagccggcgtgagccgcaaacgtgtaggcctgctgccacaggagcgtacgcccgtgcgtgaaggcgcggaaattgtcgacgcagacggcaccgtgatcggcagcgtgtgcagcggcggtttcggcccgaccctcggcggcccgctggccatgggttacctggacagcgcattcatcgcactggataccgaagtctctgcgttggtgcgtgggaaaaaggtgccacttcgtgtaagtaaaatgccatttgtgccacaacgttactatcgtggctgattgactgtttctataagtaacgcgattgcgttaacgtgcactaatctgtaacgcaatcgccataaaacagtgcacttccgatagtcttttatagagggatcaacctataacaagtgaccaactctatcgaataagtcagttccacactgttcaacaaagtgtcatgagccccagcaaaacctgggcttttggcagggcttgttttttctctattagttggcgtagagtttgcccactgtgtttgcatgggtcgcttggaacctggacctgggcagtagctgaagaagtccgctacaacccgttcgacgtctcttactttcctgcaacccagcccagtactctttcatgcgaaaggggctgtcattaatttttagcgtcaaggaaataagaaaatggctgaacgtcagagcggtaccgtcaagtggtttaacgacgagaaagggtttggttttatcactccagaaagcggtccggatctgttcgtgcatttccgcgctattcagggcaacggcttcaagagcctgaaagaaggccagaaagtgacattcgttgctgtgcaaggccagaaaggcatgcaggctgacgaagtactggcagaaaaccactgagttcttctgcgacaaaaagcccctgatggtgacatcaggggcttttttatgtgcatttgctcgtaaaatggctttttttcataagagagccctgccatgtcgaaacccctgctgagcccccaaggcgaattccccgccgttggcctgggccgtcgcctggcagcgatgttctatgatttcctgctatgcaccgcactgctgatcgtcacagcgtttatctacaagctgatctggatcgcgtttgtcggtgaagccaggatgcgcaccctcaccgaatccggcgcgctggatggcgacccgttgttatcgacgattctgttgtttgtgctgtttggctttttcgccaagttctggacccattccgggcagaccctgggcatgcaggtgtggggcgtacgcgtacagaacgctgacggctcgcggatcagcctgtggcaggcgctgttgcgcttcgtggtgtcgattgcgtcgtggttgtgcgtggggctggggtttatctggtcgctgtttgataagcgcaaacgcagctggcatgacatctattcggacacgcagttggtgcggattcccaagcagaagaagtagccttctacctattggatatcaaaatgtgggagggggcttgcccccgatagcagtgnnnnnnnnnnnnnnnnnnnnnnnnnnncactgctatcgggggcaagccccctcccacattttttaccgcgttcgactatgcgttaccggcccgcttcagccgcgccgcctgggtgaaatccaacatgcgcttgagcggacgcactgcctgcgggattaccgacggttcgacgaatatctcgttactgccctcacgcagacactgcaacgtgcgttccagcgtgttcatcgccatccacgggcagtgcgcgcaactacggcacgccgcgccgttaccggcggtaggcgcttcgacgaagaccttgtccgggcacagctgctgcatcttgtaaaagatgccgcggtcggtggcgacgataaacgtcttgttcggcaggcgctgggccgccgcaatcagctggctggtagaacccacggcatccgccagttcgatcaccgaggtcggcgactccggatgcaccagaatggctgcatccgggtaaagcgccttcatgtcttccaactgcttggatttgaattcttcgtggacgatgcaggcaccgtcccacagcaacatatcggcaccggtctggcgctggatgtatgtgcccaggtgcttgtctggcccccagatgattgtctcgccgttgtccatcaggctttcgacgatttccagcgcgcagcttgacgtcaccacccaatccgcccgggctttgaccgccgccgaggtgttggcatacaccaccacggtgcgttcgggatgctggtcgcagaacgccgaaaactcatcgactgggcagcccaggtccagggagcaggtggcttccagggtgggcatgaggatgcgcttttcaggcgtgaggatcttggcagtctcgcccatgaaacgtacgccagcgaccaagactgtcttggccgggtgagcggcgccgaagcgggccatttccaaggagtcggagacacagccaccggtttcttcggccagggcctggataaccggatcacagtagaagtgggcaaccagcaccgcatcctgagccttgagctcggcggcgatggcagtgcgcaggctcgcctcttcatcggcgctgagggccttgggctgcttggcgtcgaggtgggcttgaaccagaaggcgttcggaaatttgcgtcatgttcgcaagacctgcaggcgcagttgcgcgaaagtcgagtgtaccaccggctctggagcccttcgggcaccgccggacgaagtgattgtgttcatcaagcacgggttaaggtgaagctcggcaaggctacagaatatcgaatggtttcaaaagcctaatctggtactcgcctgcgccttcgtggagcaaaaaaaaggaaaccccgcttggggtttcctgcgtttaccgccggttgttcatcaaaaacggtaagtcaccgaaccaccaaacccgttggcgctgttttcatacttcgcatcgtaggtcaggccaacctgggaaaggttctgccgcaccttgatcggctcttccttgaggtaggaatacgccacatcgaaggtcaggttatcgacgggcgtccagccggcacccaggctgaaaacggtgcggtcccccgtgggaatccgcacggagcggtcggtgttgttggtaggcgtctggtccaccgagagaccggtccgcagtacgagttctttgttgacccgataggccgcaccgatcgcgtgagaccaggtgtcatgccagtgctgctgctctgtgatggcgcccaggccaccgaattgagcagtgaggtcggagactccatcgttattgatggtgatctttttcaactgactccagcgggtataggtgctgccaaggtacaaggtccagtcgtcattcagttgatgggttaccgagaaatccaccgatgacggcgtggtcacgtccaggctggcgtcatacttctgcggcccaccgtcgaaggcatcggaaatcaagccggaggcatgggtcttgccgctgaggtggtagaccacctgcgagtggtaggtcacaccgatgcgcgtgctctcaagaggctgcatcaggagaccggcgttgaacccggtagcgttgtcgtcacctttgactttcacactttcgccggcgccgccacccagcggcacattggaatccagctcgccactgatgcggttgaaggtcgggccaaagcccaccgacactttatcgttgaaggcatagctgaccgtcggttgcacggtgatgacctggaccttgctcttgttgccaaagccattgccctggaagctgtgttcatagtcggtcaccaggccgaacggcgcgtagatgcccaggccgaatgcccagtgctcatcaatgggcgtgaccaggtagcccatcggcacggcaatgccgggcaccatatcgcccttgttggtgcctgggttgtcggcaccgaactgcgaggaactggcgtccttgatgttggatttggcatcgaggtaagtcgcaccgaggctgacttcattctgcttcagacgcgacatgccggcggggttgccgaacaccgtgctggcgtcttcggccgaggaggaacgaccggcgtagcccgtacccattgaactgatgctttgttcattgagcgcgaaaccaccggcgaacaacggggttgaggcaagggaaacggcaagcgccaaggcgcctttaagagttttgttattcattattaggactcgaattatggggcagcgatggggaagctaccaacgttcgagcgaggggtttatgaagagtttttcatgcactgaattgtcggacaattctatgcatttcaatgactttagctgttttttcgtttccagcaatgaccttttcacccgaatctgaccagccggttttaaccacggattggctatggctcagatataaaaaaccccaagcgcttcatacgcttggggcattcggtgtgttcaaacaggcaaaaaaaaacccggaaatcctcacttgcgtgggccttccggattttctaaaccgccaaaaatggtgggtcgtgtgggattcgaacctacgaccaattggttaaaagccaactgctctaccaactgagctaacgacccgctgtgtggtggcgcgtataatactgatttctaaggattattcaacaccttatttgaaataaatcagaaataacgcgttgggtcagtaattccggcggcttggaagccttctgcacgcagtcggcagctgtcgcatttcccacaagcacggccgtcatcgtctgcctggtagcaggaaacagtcagcgaataatcgacgccaagtcctacacctgccttcacaatgtcggccttgctgaggttttgcagcggcgccaggatacggaagccctgcccttctacaccggcctttgtcgccaggttggccatgcgctcgaatgactcgacgaattctgggcggcagtccgggtagccggaataatccaccgcattgactccgataaagatatcgcgggcgttgagcacttctgcccagcccagggcgagggacaggaacacggtattacgcgctggtacgtaagtcaccgggatgccttcgccgggggtttccggcacatcgatgctgctgtcagtgagggccgagccgccgatgccattgaggttcaaaccgataaccttgtgctcgaccacccccatgtcacgggcaacgcgggcagcagcgttcagctcggcgcgatggcgctggccgtagtcgaaactcatggtgtagcaggcataaccttcagcttgcgccatcgccaccacggttgccgagtccaggccaccggacagcaggattaccgcgcgtttttgatcaatcattggttcagtcatttcagcgtcctggctcgtcgttccaaaggtatttatgcagttgcaattgcagacggactggcaggttatcagccaccacccagtcggcaaggtcgcgcgcgttcagatcatggtggcttggcgagaacaatacttcgcctgcgcggcgatcaaggccgtactgaatcagcttggagttcgcccagtcgtagtcatcgcgcgaacagataacgaacttgacctgatcgttggccgtcagcaattcgatgttctcgtagcgattgcggtgcgcttccttggagccgggggtcttgagatccaccacgcggcttacacgcggatcgaccgccgagatatccagcgcgccactggtttccagggagacctcgtaaccggcgtcacacagctgcttgagtaatgggatggcattgggctgggccagcggctcaccaccggtcacgcagacgtagcgcggcttgtagccggcaacctgttccaggatgtcatcgagggtgcgcaccgtgccgccactgaaggcgtaggcgctatcgcagtactggcaacgcaaggggcaaccggtcagacgcacaaatactgtgggcaggccggccgttcgcgtttcaccctgcaacgagtaaaaaacttcggtaatacgtaatgtgtcttgcatagtcgccacgggcgtaacagctaaacaggctgtccgcctccgtcaggcactttaagggaccccgccaacgcgtagaccccaaaaagcgtgtttcataaaagggcgtggattctaacgaaaaaacccgcgccaggcgcgggtttcttctaaacgggcaaacgtcgcttacaagcgctgcagatcccgttgggccaactgggcagcggaagtccccggatactgggccaccacctgttgcagaatgcctttgaccttgtcggtatgacccaggcggcgttctacgtcagcgagtttgtacagcgagtccggcaccttggcgtgcttggggtacagctggctgaccttggcaaatgcctggcccgcgccctgtagatcaccctttgccaggttgacttcacctaaccagtactgggcgttgcccgcgtattggctgttcgggtatttgcgcaggaaagcggtaaaggcctggctggccttgtcgaaatccttggctttgatcaggtcgaaggctgcatcgtaatacagcttttccttcgccggatcacccggttcgctgctcgcggcaggggcttggctggcagccgcccctgctgctgcaccggcagcagcgctaggcgcgccaccggcagaagaattatcaggagttgcggcaggttgaacgccggctccaatacgttgatcaagatccttgtaacgctccaggccttcttgcttgagctggttcacctggttttgcagtacctcaatagcgccttgctgctgcgcgatttgatcctgcatgcgttgcagctggttgaacagttcgccctgtgccgagggagcggacgtagccgctccccccgcataggcgccgttcgtgccataacccgctggcggataactgctcccgctattgttatagccagagttgctatcttccacaggaaccgcagcccacaccgcaagcggtgcgaggctgagagccaatacagtcagagcacgacggcacgttcgcatgacgaattacttacgcagttcgacgcgacggttttgagcccaggactgctcgtcgtggccagtagcaactggacgctctttaccgtaggaaaccagttccagttggcctggagcaacaccttgcagtaccaggtagcgctgaacggctttcgcacgacgctcgcccagtgccatgttgtactcacgagtaccacgttcgtcagtgttaccttccagaacaacgcgagcgccgttagctttcaggtccttcgcgtgaacgtccagagcgcgcatggcttctggtttcaggtccgaactgtcgtattcgaagtagaaagtggtgatagcgcgcagagcagcttcttcgctcagggagccgtcaaccgcaccagtgttagcgccgtaaccagcgtttggatcaacagctgcgccttcaccggcattgtcgccgcctttagacgagcaaccaacggctacggacagagccagagccagagcagcaaacttaccaaacttcagcatttccatcgtgaaactcctaatgaaccccagtgtgttaagcaaatctttttgtagcgccgcgtcagttcaggtaaggggaccaggatggttctctgacttcgccttgtgcggtaggaagtgggagccttacgcgtccattaatggacacgagcatcaagactccccggccctgctggcgggtggcgtagattaccatggtgccgttgggcgcaacagtggctgactcatcaaggttggtatctgtaaggatttttacggttccgcgctgcaaatcctgggccgcaacccggaaattagtgaaaccatcctgacggtgaatcatcaccaacgtcttttcatcagccgaaagtttagggttggcgttgtagttaccgataaaagtaacccgttctgcaccgccaccattcacgttcgccttatagacctgtggcttgccgcctcggtcagaggtgaagtagatggtcgaaccatccttgccccagaacggttcggtattgatacccggaccgctggttgcacgagtgatctggcgcgtggccatgttcatcacgtagatgtccgggttgccgtctttggacaacacgaacgccaggcgcgaaccatccggtgaccacgctggcgcaccgttgaggccttcgaagttggtgatctgctcacgacggccagtatcaatgtgctggacgaagatacgcggacgcttctgctcgaaagacacgtaggcaatgcgcttgccgtccggcgcaaaacgcggcgacaggattggctcacgggattgcagcaaggttacagcgcgcgcaccgtcgtagtccgaacgctgcaaggtgtagcgagtgttgtccaccgagaaacgctcagccgttacgtacagcaggcgcgtcgagaaagcccccttgatgccggtgagcttttcaaacgactggtccgaaatgtagtgggccatgtcgcggatctgctcggcagtgcccgagacgctgccggtcaggacctgctgctcggtcgccacgttgaacaaggtgtaggtgatttgcaggcgaccgccggccggcgtgatgttgccgaccatcaggtactgcgcacccaccgctttccaatcacggaacacgacttcgctggcctggtttggctggctgatcatgttgccttttggaatgggcgcgtagtaaccggagttgcgcaggtcgtcactgacgatctgggccatgtcgtccggcagcacgctgccgccctgccagccgaacggtactaccgcgatcggggtggcccggtcgctaccgctggtgaccaggatgttcttttcatccgccgccgctatccctgccatacagcaaataacgacaagcattcctcgaagaaggtttctcacaaggctagatcctcaggtgtgaatgtcatcttgaatgaacgatagggagcgaagtcacttggtttcattccctgcatctcggtcaaccggccaatgttcttgactgcggcaaccgccgaactgtcgaacgaaccgtcaccactggacttggccacgctgaccgaagtcaccgtaccgtccggcaacatgccgatctgcagcactaccgtcatgcctttgcgcgccgaaggtggacgagtccagccttctgctgcccgcgcccgaatcaggtcatcgaaactgcccgcgacttcatcaccacgttcatcggccaaggcttgctgacgctgcggcgtgtcggagagcaaatctgccaaggcctgggccttcttctcttcggcggacttgcgcgctgcttcctgggcctttttcttctgggcgtcggcggcagctttcttcttcgcgtcgtcggcgacttttttcttcgcctcgtctgcttcagcttttttcttggcgtcttcggcggcttttttcttcgcgtcttcgactattttcttcttggcgtcttcagcggcctttttcttggcctcttcttcggcagccttcttggcttcttcttcagatttcttcttggctatatcagccaattgtttctcttcggcctttttcgcttcggcagctttctcggctttcttggcttcatcagcctttttcgcctcgtcagccttcttggcttcatcagcctttttcgattcctcggccttttgagccgcctcttctttcttttgttccgcagccgccttcaccgcttcctgctcgaccttcttctgttccatctgttcgacttcagtctggcgtgcagccgacttctgggcctcacctgcaatcttctgattggtctgggtggtggcctggcttttcgatttcagctgatacagggtcgcctgcacgatcggcttggctggcggcaggtccggggtcatggcaaagctgacgaacagcatgccaaacaccaggacgtgcagggcaatcgcccagacgctaggccagaagaagctttccgaggcggacggctctcgctgttgctgcatcagggcgcctcggtaatcaagccaacgttacccacgccggccttctgcagcccgcccatggcgcccatgacagagccgtagtcgaccgatttgtcgccacggatgaacacctgggtgtgcttgccgccttcgttgccggagcgaatgatcttggtcaccgcatcggtcatcgccggcaaggtgagagccttgtcttgctgcttctgcgtgtcgacttcgctgccaaggttccagtaataggtcttgtcagccttgatcgaaatggtcaggacttgagtgttgttgtcttgcggcaaggcttcactggaaaccttgggcaaatcaaccttcacgccctggttgagcatcggcgcggtcaccatgaagataaccagcagcaccagcatcacgtcgatgtaaggcactacgttcatctcggcgaccggcttgcgctttttgcgagctcgagcgattaaagccattgggaattacctgcttattcttcgctggtgtgcactttacggtgcaggatcgcctggaactcatcggcgaaggtgtagtaacggccgatcaacgtttcgctggtggcagcgaagcggttgtaggcgattactgcggggatagcggcaaacaggccgatcgccgtggcgatcaaggcttcggcgatacccggggccacggtggccagggtcgcttgctgggcctgggccaggccacggaaggagttcatgatcccccacacggtaccgaacaggccgatgtatgggctgacggaaccgacggtggcaaggaacggcaggctttgctcaagcttttcttcttcgcgggaaatggcgacgcgcatggcacgggccacaccttccatcaccgcttccgggtcaacgcctggctgctggcgcagacgggagaattccttgaagccggcgcggaagatctgctcgacgcccgaatccgggtccgggttgctgccagcctggcggtacagcttggacaggtcgatacccgaccagaagcgctcttcaaagctctccagggcacgtcgaccagcacgcagcaggttgctacgctgaaaaatcatgacccaagaggtaaccgatgcggctaccagggtcagcatgaccagttgaaccacaacactggcattgctgaccaggctccacatggaggaatggtcgacgacggtaggttccacgctaaatctcctgctttgattgtttacccgcgccgcttacgtcggcaaaggccgcacgtagagcttcgggaatggcccggggtttcaaactattggtgcgcacacaggccaccaggaactgcccctcacagagcagcgttgcatccgttgcccgcctgacctgctgcttgaaacgcaggctgacacggttcaattcgattacttcagcgctgaccaacagctcgtcgtccagccgcgccggcgcgtgataccgcgcctcgctggagtgcacgacgaataacaggtcctcgcctgccagctcggattgggcaaagcccagctcccgtagccgctcggttcgagcccgctccatgaacttgaggtagttgacgtaatacacgatgccgccggcatcggtgtcctcgtaataaacgcgacagcgatgtgcgaacgactgatccccgttttgcgcgcgcatactctagtgcttactcctcaggttgccaatccggctgggcaactgttttttcattgtctgaaacttttctaccgactgaatgacgacaccagccactaggacagcacaaacctcggataaatcgtctggcgtgaagcttttaatcgtccactgcatcgagaaattcgtctactacaggcatctcgcccaatcgtgacggaatgtttaacccaaagtgcagataggcgtggcgcgtcaccaccctgccccttggggtacgcatgatgtaaccctgctgaatcaggtacggctccagcacgtcctcaatggtatggcgctcttcactgatcgccgccgccagactatcgacacccaccggccctccgtcgaacttctcgatcatggtcaagagtagacgccgatcctggtgatcgaagccatgctcgtccacatccagcaggttcaaagccaggtcggccacggccttggtgatatgccccttggcccgcacctcggcaaaatcccgcacgcgacgcagcaaacggttggcgatccgtggcgtgccgcgggctcgacgggaaatttcaaacgcgccttccgggtccagcggcaggccgagaatattcgccgaacggctgacaatggtcgccaggtcagccgtgctatagaactctagacgttgaacaatgccgaaacggtctcgcagcgggttggtcaacatgcccgcacgggtcgtggcaccgaccagcgtgaacggcggcaggtcgagcttgatcgagcgcgccgccgggccttcgccgatcatgatgtcgagctggaagtcttccatggccgggtacagcacttcttcgacgatcggcgagagccggtggatctcgtcgataaacagcacatcgtggggttcaaggttggtcagtaatgcggccagatcccccggacgctccagcaccggaccggaggtggacttgatcgacacgcccatttcctgagcaataatattcgccagcgtggtcttgcccaaccctggcgggccgaagatcaacgtgtgatccagggactcattgcgcccgcgtgcagcctggataaacaactccatctgctcgcgcacggtgggctggccgatgtactcggccaggctcaggggccggatggcgcggtcctggacctcttcacggtcgcgcgggccggtggctgcaatcagacgatcagcttcaatcacttaaatcattcccttcagggcgcggcggatcatgtcttcactgctcaggttcttgtccttgatggccgatacggccttgctggcttcctgcggtttgtaacccagggaaatcagcgcgctgactgcatcgctctcggcactcgccacctggccggccggcatgtccggctggttcgggacgagggcaaacatgctcggtacgacttcccaggccttgaagcggtccttgagctccaccagcaggcgctcggcggtcttcttgccaacgcctggcaccttggtcagcgccgaggtgtcctgggccgaaacggcacgcaccagctcatccacttccaggctcgacatcagagccagggccagtttcggccccacgccattcaggcggatcagctcacggaagaagtcgcggtcacgcttgccaataaaaccatagagcaattgcgcatcttcgcgcaccaccaggtgggtgtgcagcgtaatcggctcaccgaccgacggtaggcgatacagggtggtcatgggtacttccagctcataccccaacccatttacatccagaatcaggtgcggcggctgtttttcagccagggtgccgcgcaagcgtccaatcacggttcagatccttaaagctagggtcagagcaaggcccgaccggaaaacgattgcgctgatgctatcagagacgcaggcgcccgccacgactgcgtgccgtgcccaggccgtggggcagcaagcttgagcgggtgtgcgcatgacaaatggcaatagccagggcgtccgaggcgtcgatctgcggcttggcggtgagcttgagcatgtgcatgaccatcatctgcacctgctctttgttggctgccccggtgccgaccacggcctgcttgacctgggtcgcagtgtattcggcgatctccatgccctcctcggcgcccgccacgatggcagcgccgcgggcctggccaagcttcaacgcggagtcggcattctttgccatgaacaccttctcgatgcccatggtcaccggcccgtaggtctggatcacttcacgcacgccgcgatagacgatctgcaggcgctcggccaactcgcccgcaccggtgcggatgcagcccgaagccacatacacgcagccacgcggggtctgttgcaccacgccaaaaccggtaatgcgcgaaccggggtcgatacctaggattaaagtcataacgcctgcgggttgggtaaacacaatttttcatacagagactaaccaatgtgggagggggcttgcccccgatggcnnnnnnnnnnnnnnnnnnnnnnnnnnnnnnnnnnngccatcgggggcaagccccctcccacatttaaaactacatcgcccttcagcctagctgttcggcgacagactctgggatatccgcattcgaataaacgttctgcacatcatccaggtcttcgagcatatccagcatcttcagcactttctgcgcgccatccaggtccagctcggcgctggtggtcggcagcatcacgatttccgcgtcagtacctttgaaaccggccgcttccagggcattacgcacggcgtagaagctggcgaacgaggtgaacacgtcgatggagccatcttcgttggtcaccacgtcatcggcatcggcttccatggccgcttccatcagcgcgtcttcatcggtgcccggtgcgaaagagatctgccccttgcgctcgaacaggtaggccaccgaaccgtcagtaccgaggttgccaccacatttgctgaatgcgtggcgcacggcggcggcagtacggttgcggttgtcggtcatgcactcgaccatcaccgccacaccgcccgggccatagccttcgtagctcagctcgaccatgtcgtcggtatcggccgcaccggcaccacgggccacggcacggtcgatgatgtcacgactcatgttggcacccagggccttgtccagcgccaggcgcagacgcgggttggagcctgggtcacccccaccctggcgggccgcgacggtcagctcgcggatccatttagtgaaaatcttgcctttcttggcatcctgacgctctttgcggtgcttgatgttcgcccacttggaatggccagccataacacaactccaaaaattctctagaaaccttatcaattccgccccaggcagaatgcaacccttgtaacgcaaaggcgcatccgaagatgcgcctttttagactgcgtaaacctcagtgcgctttcacgcagcagccttactcagccttcggcgtctcgcgcagacggatgtgcagctcgcgcagtgccttggcatccaccacacctggagcctgggtcatgacgtccgcagcgctctgggttttcgggaaggcgatcacttcacggatcgactgggcgccggtcatcagcatcaccagacggtccaggccgaacgccaagccaccgtgcggcggcgcgccgtatttcagggcgtcgagcaggaagccgaacttctcttcctgttccgcttcgttgatgcccaacaggcggaagaccgcttgctgcatctctttgcggtggatacggatcgaaccgccacccagttcggtgccgttgagcaccatgtcataggcccgggacagcgcgccagccgggttggcttccagctcggccggcgagcacttcggcgcggtgaacgggtggtgcaaggcgctgaagctgccgtcgtcgttctcttcgaacatcgggaagtcaacgacccacatcggagcccattcgcaggtcagcaggttcaagtcgtgacccagcttgatgcgcagtgcgcccagggcttcgctgacgatcttggccttgtcggcgccgaagaacacgatgtcaccgtcgactgcaccgacgcgatcgaggatcgcgttcaggttgtccagcggaatgtttttaacgatcggcgattgcaggccgtcaacgccattggcgcgctcgttgaccttgatgtacgccaggcccttggcaccatagatgccgacgaacttggtgtagtcgtcgatctgcttgcgcggcatgctcgcgccgcctggcacgcgcagggcggcgatgcggcatttagggtcgttggccgggccgctgaacaccttgaagtcgacttctttgagttggtcggccacgtccaccagttccagcgggttacgcaggtctggcttgtcggagccgtagcggcgcatggcttcttcgaaggtcatgtgcgggaagtcgccgaactccaggtccagcacttccttgaacaggttgcggatcatctgttcggtcaggcccatgatttctttttcatcgaggaagctggtctcgatgtcgatctgggtgaattcaggctggcggtcagcgcgcaggtcttcgtcgcggaagcacttagcgatctggtagtagcggtcgaagccggcgaccatcagcagttgcttgaacagctgaggcgattgcggcagggcgaagaacgaaccggcgtgggtacggctaggcaccaggtagtcacgcgcgccttccggggtggcccgggtcaggatcggcgtttctacgtccaggaaaccgttttcgtcaaggaaacgacggatgctggtggtcatgcgcgaacgcaggcgcagcttctcggccatttccggacgacgcaggtccaggaagcgatagcgcaggcgggtctcttcgcccacgtcagagtattcgttgagtgggaacggcggggtttccgactcgttcagcacttccagctcatagcccagcacttcgatgccgccggacgccatgttcttgttcacggcacccgccggacgcaggcgaaccttgccggtgatcttcacaacgtattcgctgcgcacgcggtcggcggcggcgaagcttgcggcgcgatccgggtcgaacaccacttgggccagaccatcacgatcacggatatcgaggaagatcaccccgccgtggtcgcggcgacggtgaacccatccgcaaagggtgatttcctgaccttccagggtctcgttcagttggccgcaataatggctgcgcatcatggtagtggtttcacttctcgtaattcgaaattcggtggaggcctgcctcgtcaccggacattaaagcaggggacggataatgcaggagcctgcgcgtagagttcaactcagtctgctttgtcgccgccggccaggttcttcttcgagccggtcttgaaatcggtctcgtaccagccattgccgctcaagcggaagcccggcatggacaacatcttcttgagttccggtgcctggcaggctgggcaatcgaccagcggcgctgcgctgatcttctgaatggcttccaactgatgaccgcaggaagcacattggtagtcgtacatgggcatggcgatgtctcggcgatcagaacgttactgcgccacgcctgccctacggatccgcagcatgcgtagcaaagcgcgggattatatccggtaaatcgaggcagcgcagccggcattctgcccggggccctgcccgccatgatagagggccggccccgaagcccggtggctataccggtgaacaggcgggttcagcacgccctttcaggacgtgcaccacacaaaccaccctgaccaacccactgaagttcttcaccccgccataacgcaagtgcacttcccgatcgacataagacagcaacgcactgactgagcaggcattgatcctggcgatttccgtgaggatattccaatagatctgctccagccgcaggcacgtggaaaatccattgagccttaccgatcgggacagcggcttggccagtcccatatcgaacccttttgcaaacgggtcgatctttatcttatgaaaaccaccggtttccatcactccattacccactccgcgtgacatacacctgacactccattgccaaacaaccgcccatgggtactcccattgggcaatggccctataaaacagcagggagcggcgggcaaccagaagacgcggagttgatcggcgtaggacaacgccaggaaatgcgcggaaacaagcgagcggcgccagggcgacgccactcaaggccagcgtttactgattttcaagcagggaacgcagcatccacgcagttttctcatgcacctgcatacgctgggtcagcaggtcagccgtcggctcatcgctgaccttgtcgagcagcgggaagataccgcgcgcggtgcgggtgaccgcttcctggccagccaccagttgcttgatcatctcttcggcgctgggcacgccttcttcttccttgatggaagaaagacgggcatagatggagtaggcacccggcgccgggaaccccagggcacggatacgctcggcaatggagtccacggccagggccagctcgttgtactgctcttcgaacatcaagtgcagcgtgcggaacatgggacccgtgacgttccaatggaagttgtgggttttcagatacagaacataggtatcggaaagcagtcgcgaaagcccgtcgacgatggatttacgatcttcttcactgataccgatatcgattgccatgtttatccccttcaattgacaagcattcattgatcaggtgcaggaccactctagcaagagtgccggtgatgcgcagcccggcgcggcaattcgccccggtgcgccctgtcgaccggcacaacccaagcctttgaggcaagtaggaaatttctctgctggccgtttgaaaaaactgcacgcgtctaggacaagcgtttgctgcagaaatgccatcgcccttgcaataccccgaaatgcttgatttgagtaggcacagcctttgctgttaaatagatggcgtgtcgccgccgttactttctgcggcagcggcataggctgataccccgcgcacgtgcccaacgcctcccattgttcagaagcgaaccgtgccagtcagctcttccttgtgatccgtcttaacgtgagttaatcaaaatgttgaaaatcgtccacctgctaacgggcgttgcagctttgctgctgtcctttatcccgagcctgcagcctgaaagcctgccgtatctggaacaacacgacgctctgtacctggccatgttcggccttcttaacctgacgctggcaccggtgatcccttactggaacaaaggcccacgtcatcaactgcaaaacctggtcagcgcgctgctggtactgaccgttgtcgtacaaaccctcaccctcctggcacccatgcctgaagtcggcggccacccggccatcctgctcagcctggtgattgctgtggtcgccatcgttcttcacctggccatcagcttctaccgttcgtcccctgcggcctcgtcgcaaacctacgacatgaccaatcgggataccggtaccgtcaagtggttcaacacatccaaaggcttcggctttatttcccgtgattcgggcgacgatatcttcgtccacttccgggccattcgcggcgaaggccatcgcgtcctggtggaaggccagcgcgtggagttctccgtgatgaatcgcgacaaaggcctgcaggccgaagacgtgatcgctgcactgccgcgtcgctgataccggctttcgcagcaaaaaaaaccgcgatccagcttggctgggtcgcggtttttttatgcgcggctattaatagtgaggcggcggcgcttcttcttcggaggtttcgaactggccgcccatttcttcctggcgtttgagcagcgcagtcatctgcagttgcaggcgttctaccgcacgctgctgggtgacgaggatgtcattgagggtctcgatggtgtcgtcctggaaggccaggcggctttccaagtcggtgacgcggtcttgcagatccatgattcagccctggttaaatatgaagtcggcgggcaacagctcgcgcagacgggcgcggatggcagcgacttgctcatcggtgtaaggctgcgccggatgtttgccccataccggcgccggccaggcagcatcgtcgcgcttgcgcacgatcacatgcacgtgcaactggctgaccacattgcccagggcgccgatgttcatcttgtcggcggccaagccttcattcagcaactgggccaaggccgtcgtctcttgccacaaacgctgctggtcggcgacatccagttgaaacacttcgctgatagcgttgatgcgtggcaccaggatgaaccacgggtagttcgagtcattggacagcagcaggcggcacagcgggaagtccccgatgaccagtgtgtcttgttgtaggcgttgatctagggcgaacaccgcgggcactccgttcggcaagtcaggttcaggcgcccagcataccttcgaatgcgcccggcttcacggcgaatgcaggaaagcgccggcgccaatgatgaaaaagcatgcactctttcgaggcgggcgaatatttgagctacgctaaaccgggcctcaccgggacgcaccaaaatgacccacttgtgcttcaaagggatccgccaattacccactcatgggggtgaaccggtaacgtttttccctcgcacaggttttatgcaccaccgaagaggggtaacaccgccgcgtcaagcccaaaccaaacggcgtaaaaagcccgtgcttatgcggtttttacacgcccgcaagggttttcacgaaaaaatgacattcggttaccgctttgtgcacgcttgttgcattgacacctgcatcgtcggcaacgacacctgaatggaagcaggtgtttcgcgaaaaaaaaacagcagcgtttcaatgcgtatcaaggaagtgttcaaactttgaaaagggtttggaaacagtattgaagttgtcagtccggttacaacaggactgtgaatttgcgacatggagctagcaatttacgacagcctcgtaaagaagctgaaaggatagatgggtaagtatcgtcaatagggtctgcgtgatataactttgcgccgacacataaaagaaagagccgcccagataaaaatacaggtgggacggcagtactcttcctaaaaccaaaggagcaaatcacgatgcgcgtgatgaagtggagcatgatcgccctggctgtttcagcaggcactacgcagttcgcaatggcgtccgcccaaagcgattccaaaggctttgttgaagacagcactttcagcattaatactcgcgctctgtacttcagccgcgacttccgcaacaacccgtcgggcccaggctcccagagccgtgccgaagaaaccggcctgggcttcaatgccctgtacgaatcgggcttcactcaaggcaccatcggtgtcggtgttgatgtgattggcctgttgggcgtcaagctcgacagcggcaagggccgtgcgggtaccggtctattcccaacgggttccgacggtcgctcgcaagacgactactccaaaggcggcggtgccgttaagttccgtatctccaatacggtcctgaaagtcggtgaccagtacactacggctcctgtgttcgcctctgacgacagccgtttgctgccagagctgccacaaggtatctcgatcaccagtaacgagatcaagggcctgaaactggaaggcggtcacttcacttccagcattgcgcagaaccagacctatcacgacagccttggcttgaccaaaaccgattttgtcggtggtgtctactcgttcacgcctgagttcaccggcagcctgtactacgcgaagaccgaagattacttccgcaagtactacagcaacctgaactggacccacgcactgagcgacgaccagtctttcgccttggacttcaacatctacgacaccaagagcgagggcgaaggcctgcaacgtgcttccaaagacagcgctctgccgttcgcacaacgcaccaagctcgacaaccgtgcgttcagcttgcagggtgcttacaccatcggtgctcacacctttactctggccgcccagaaagtcaccggcgacggcgactacggctacggcgtagacggcggcggcacggtattcctggccaactccatcgcccgttccgacttcaacgccgaaggcgagaagtcctaccaggctcggtacgatatcaacatggcgacctttggcattcctggccttagcttcatgactcgttatgtcaccggtagcggcgccaacactgccaccacttcgaacggtaaagagtgggaacgtgatatcgaagccaagtacgtggtacagagcggcccagcgaaaaacctgagcctgcgtctgcgtcaagccacctatcgttcgggtgatggcgtttactacggttcgccttcgatcgacgaactgcgtctgatcgcgaactacccgctgaacatcttgtaactgctcgttcgattacaacgatggcttaaggcttcggccttaaataaaaagccgccccccttgcaaacaagagggggcggcttttttattaccgtttaatttcaatcgaaaaataactagcaagctaactaacgagattaacccgtcgaccgtgaacctgaccttttggccaagttcaatgccattgaccttagttacttcgtaacactttcctgcatcacccgaataacccgctgcggaaatggaatatcaatccccgccgcttttaaacggtcacgtgccagttcgttcaacatgaacaccacatcccaataatccgcggtcttggtccagcaacgcagggaaacggtgatcgaactgtcacccaaagtcgaaaccaccgccacggcagccggatcggccagtacacgtggatcttttgccagctccagcagcacttcacgggctttctgcaggtcagcttcatagtccacacccacatcaaacaccaccttgcgggtcggctgacggttggtgttggtgattaggccgttggacaggctgccgttagggatgatcacggtcttgttgtcgccggtgcgcagcacggtatggaagatctggatgctgtcgacggtacccgaggtgccttgggcttcgatccagtcaccaatgcggaacgggcggaacagcagaatcagcacgccgccggcgaagttcgccaggctgccttgcaaagccaggccaatggccagggtcgcggcaccaattgcggccacgaacgaggtggttgccacgccgatcatcgaggccacgttgaccaccagcatgactttgagcgcgatgttcgccaggctggtgatgaagtgttgcagggccaggtcagcattgcgcagtgccagcaaacggcccactcgatgggtcaacacgttgatcagccaccaaccgatggccagggtgaccactgccagcaaaaaccggctgccgtattccatgatcatcggcagccacgactctgaggtcttgatcaagtgatccacttcagcattgaaatccatctacattctcctggttaccggatgttcggcgtatcgagtggccataaatgcaattgagccccgaagggctcaatagtaggcgcaggttgtggggcgtgggacgtcaaaaacgcccgcaggttccccaatgtgccatcagtcgcggaagttattgaactgcagcggcatgtcgaaggtcttggcgcgcagggccgcgatggcttcttgcaggtcgtcacgcttcttgccggtgacgcgaacctgctcaccctggatcgcggcctggactttcagcttggcgtccttgatgtgggcgacgattttcttcgccagctccttgtcgatgccttccttgaggatggcttcctgcttcatcagcttgccggaggcgtaggcgtccttgatttcaaggcattgcgcgtcgatcttgcgcttgaccagcgacagcttgaggatctcgatcatcgcttccagctggaaatcggcttcagcggtcaggttgacggtcagctctttttccttgaactcgaagctgcccttgcctttcaagtcatagcgacggtccagctccttgacggcgttttcgacggcgttggtgacttcgtgtttgtccagttcggataccacgtcgaacgaaggcatgtcatatctccaatataaggggcgggctcagtagagatggagcgcgcccaagctaaaatgccggggcattatagcggttcttttgtcccgttcgctgcgggcgaccctacggagcaaaaactgatgtcgaccacctggcatattctcggcgccggcagcctgggcacactttgggcgactcgcctggcgcgtgctggcgtgcccgtgcggttgatcctgcgcgatgaagcgcgcctggccaactatcagacagccaaggggctgaccttggtggaacaaggtgtagaacacacttacccggtgacaggcgaaacatccgacagtcctgggctgattcatcgcctgctggtggcgtgcaaagcctacgacgctcaagcagccgtcgcacagttgcaacatcgactggcgcccgatgccgaactgatcctgctgcagaacggcctcggcagccaggacgcagtcgccgcgcaactgccccaggcccgctgcatcttcgcctccagcaccgaaggcgcgtttcgcgacggcgactggcgcgtggtgttcgccggccatggctacacctggctgggcgatgcaggccacccaaccccgccgctgtggctggaggatttgcaagccgccggcatcccccacgactggagcaccgatatcctcacgcggctctggcgcaagctggcgctcaattgcgccatcaacccgctgaccgtgctgtatcagtgccgcaatggcgagctacaggcccaccagtgcgaagtcgccaccctgtgcgccgaactcggcgaactgctggaatgctgtggccagcccgccgccgcgctggacctgcaacacgaggtggaacgggtgatccaggccaccgccgccaactactcctccatgtaccaggacgtggccgcaggccgccgcaccgaaatcagctacctattgggctatgcttgccaggcggccgcccgtcaccaactgaacctgccgcaccttcaacagctgcaagtgcgcctggtcgagcagttgcttgcacgcggattgccccgcgactgagccacgcgctaccctgcccgcctgtctatcacctgggaaaaccctgatgccgctgcgccagcgtcttgaaaacctaccggtcgggcagaaactgctggccgccctgctggtgctgttgaccaccgtactgctggtggccaacctgacctttatcagcgccgcctactggatctcccaggaaagcatggcgccccaggccttgcaggccatcggccgcctggtgtccaaccctgcgctcgccgccgaggccctcgaatcgccggccaaggccgacgcattgctcaatgagttgaccagctattcgccgttgcgcgccgccgctctgtacgacggcgacggcaaccgcctggcgcagatgcaacacggcgaccgcctgcacctgcccgatgactaccggcacatcgaggcctggcgtgtcaccgagtttcgcagcaaccaggtcatcaccctgccccgcgccggccaaccgtccgggcatttgctgctggtggccagcagtgagctaccagtggcgttctacaccggcacattgactgccagcctgggcatcctgattttcagcgtactgttgtggctggtcatcgcccgtcagatcaaacgcctgatcacgcggccgatccacgaactggaagaactgtcgcgccaggtcactcgcgaagagaactacgccctgcgcgccggtcgtggcaaccacgatgaaataggcagcctggccgaagccttcaacacaatgctgtcgcgcatcgaagcccgcgagcaacagctcaagcgcgcacgggacgactcccaggcggcctacgaccaggcccagggcctggccgaagagacgcgccacaccaaccgcaagctggaactggaagtccaggtccgtagcaagatcgagaagaaactcaccggtttccagaattacctgaacagcatcatcgactcgatgccctcggcattgatcgccctggatgaacagctctacgtcacccaatggaaccaggaagccagcgccctctccggcacacgcttggatgaagctttgaaccagccgatctacctggccttccagccgctcaagccttacttgccgcagatcagggcagcggtcgaacaacacacggtggagcgcatcgaacgcgtcaactggttcaaggatgacgaacccaaacactacgccctgaccttctacccgctgatgggcggtgccggacgtggcgtggtaatccgtatcgatgacatcacccagcgcctgtccctggaagaaatgatggtgcagtcggagaagatgctttccgtcggcggcctggccgccggcatggcccacgagatcaacaacccgctgggggcgatcctgcataacgtgcagaacatccgccgccgcttgtcgcctgacttgccgaagaacctggaacacgcggaacaggtgggtatcgagttggagaccgtcaaccgctacctgcaaagccgcgaagtgccgcaactgctcgatggcatccagcaggccggggcgcgggcggcgaagatcgtcacccatatgctcagtttcagtcgccgcagcaaccgacagatggcaccttgcgacttgccggcattgatcgaccaggcggtggagattgccggtaacgatttcgacctggccatcggctttgacttcaagggccaggcgatcatccgccagttcgacccgcaactgggtccggtgccaggcaccgccaacgaactcgaacaggtcctgctcaacctgctgaaaaacgcggcccaggccattcacctgcgggaagacgacagcgaaccggggcgcatcatcctgcgtacgcgcctcaacccgccgtgggcggagatccaggtggaagacaacggcatcggcatgagtgaaaacgtgcgcaaacgcaccttcgagccgttcttcaccaccaaggaaatcggccagggcaccgggctagggctgtcggtgtcgtatttcatcatcaccaataaccacaagggccagatggaagtgcactccaccctcggccagggcacctgctttaccttgcgcttacccctggccggcagccaactgccgccttacgaactcacccaactggagcaatgaccatgggctttcgcctgtcgaagatctacacccgtaccggcgacaaaggcgaaaccggcctgggcgacggccgccgtgtgcccaaggatcacccacgggtggaggccatcggtgaggtggatacgctgaacagccagttgggattgttactggccaatcttgaagaacagagcggcaaacatccggaactgaaggatgtgatcgaggtgcttacgccgtgccagcatcgcttgttcgacctggggggcgagttggcgatgccagtgtacaaggcgctgaatgcggcggaagtggatcggctggaagcagcaattgatcgctggaatgaagaagtgggatcgctagagaacttcatcctgcccggtggctcggcgttgatcgcccaggcccacgtgtgccgcagcctcgcgcgcagtgcagagcggcggtgccagcagttgaatgcggtcgagccgttggaaggcgtggggttggcgtacatcaatcggttatcggacttgttgtttgtggcggcgcgggtaattgcaaggcgccagggcgttgctgaggttttatggcaggctgccgctaaaccccactgattattcagcgcctgatctgacgccttcgcgagcaagcccgctcccacatttgaccgcattccaacggtagaactcggtcgaatgtgggagggggcttgcccccgataaggccggtcagaacagcctcaaatctcaggccagaacgcgcgaatccctgccacaccttgggccccagcctcccaagccttctcccgctcggcgggtccaaccccgcccaacagaaacaccggcttgctgaacccggcgatcaacgccgctacctgctcccagcccaacggctgcgcatcaggatgggtctgggtcggctgcaccggcgacagcgtgacaaaatccacgtccatcatttctgccagtgccaactcctcagcgttatggcaggaagcagccagccagcgatccttcggcagcggacgccccttgctggcgtacttacgcagttgcgccgaggtcatgtgccaaccggccgcaggaaaatcccccagccattcaaacggccccttgagcatcaactgggccttgcccgcgcacaggcccaccgcatccaccgcaaggtcgcggtatttggggtcgtagccgttgggcgcacgcagttgtaccaacttgatgccgccagcaatggctttctggataccccgcagtaacgtcggggtttccagttcgcccggggtgatcaggtactcggcaggcaagcgcgcagccgcaacgatcggcgcgttggccgccgggaactcgtagttgagcagctcccgaggcgccacccattccagcggttgcccttcggcgccatggggctcaccggtaaacgccgagacttcccagacatccagcaacacctgtttgtccggatagtcatgctgcaccttgatcagcggccgcgccgtggtgacctcgatgcccagctcttcctgcaattcgcgggacagcgcgccggcgaccgattcatcggcttccaccttgcccccggggaattcccagaggccgccctggtgctgggtatcggcgcggcgcgccagcaggattttgccgtcgacaccgcggatcaccgctgctgctacatgcactcgtttcaccgcgcttatcctcttaggtacggtattccgcgttgatcttcacgtactcgtgggacaggtcggtggtccagatggtttcgctgcactcgccgcgacccaactcgatacggatggtgatttcttcctgctgcatcaccgccgaaccctgggcttcggtgtaggtttcggcacgggcgccacggctggcgatgcacacgtcgccgaggaacacgtcgatcttgctcacatccaggtctggcacaccggcacgaccaacggccgccaggatacggccccagttcgggtcagaggcgaacagcgcagtcttgatcagtggcgagtgagccacggtgtaacccacgtccaggcattcctggtggttgccgccgccgttgacttcaaccgtgacgaacttggtggcaccctcgccgtcacgcacgatggcctgggccacgtccatgcacacttcgaataccgcctgcttcaacgcggcgaacaacgggccgctggcctcggtgatttccggcaggttggcctggccggtagcgatcagcatgcagcagtcgttggtcgaggtgtcgccatcgatggtgatgcggttgaacgacttgttggcaccgtccaggatcaggctgtgcagcacgtcgcgggagactttggcatcggtagcgatgtagccgagcatggtggccatgttcggacggatcatgcccgcgcccttgctgataccggtcacggtgacagtcacgccatcgtgcacgaactggcggcttgcgccttttggcagggtgtcggtggtcatgatgccggtggcggcggcggcccagttatccacagacaggtcgtccagcgcggcttgcagcgcgccttcgattttctcgaccggcaacggctcaccgatcacaccggtggaatacggcaggacctggctggcgtccacgccggtcagttgggccagcttggcgcaggtgcgcgcagccgccaccaggccaggctcgccggtgccggcattggcgttgccggtgttggtcagcaggtagcggatcgtaccggccacgcgttgcttggccagaatcaccggcgcagcgcagaacgcgttgagggtaaacacaccggcgacggtcgagccttcggcgcaacgcatcacgactacatccttgcgcccagggcgcttgatgccggccgaagcgataccgagttcaaaaccggcaaccgggtgcaacgtgggcaaaggaccaagaccaacagccatgaatgcgctccttaaaaatgggtgatgtctgtgccgtcgtgagcgacggtgaaattaatggcaaaacgccgcgacggcaggagccggtcgcggcgcagggtgttgcagcgtcaggcgaaaatcttattcgatctggccgtggcagtgtttgaacttcttgcccgagccgcaatagcacagctcgttgcggcccagcttctgttcgttgcgcaccgggctttgagccagggccacatcgacctcctcacccaatacctcaggcgcttccaggcctggcgcttcgtcgtgctggaactgcatgcgcgcagccagtgcctcggcttcctgacgcaggcgagcttcttcctcgatcgggtcttcgcgacgcacctgaacgtgggacagcacgcggatggaatcgcgcttgatcgaatccagcagctcggagaacagcgtgaacgactcgcgcttgtactcctgcttcgggttcttctgggcgtaaccccgcaggtggatgccgtgacgcaggtggtccatggtcgacaggtggtctttccacaggtcgtccagcacgcgcagaacgatttgcttctcgaaggtgcgcagtgcttcggcactcgcctgctcttctttctcgttgtacgcggccagcaattcggccatcagtttttcacgcagggtttcttcgtacaggtggtcgtcttcgtccagccactgctggactggcaagtcgacaccgaagtcgctcttcaacgccgcttccaggccggcaacatcccactgctctggcaaggactgtggcggaatgtgtgcgctgacggtggcgttgagcacgtcctgacggaagtcggcgatggtctcgccaatgttgtcggcggccagcaacgtgttacgcatgtgatagatcactttacgctgttcgttgttgacgtcatcgaactcgagcagttgcttacgaatatcgaagttgcggccttcaaccttgcgctgggccttctcgatggcgttggtcaccatgcggtgctcgatcgcttcgccggactgcatgcccagggccttcatgaagttcttcacgcggtccgaagcgaagatgcgcatcaggctgtcttccagggacaggtagaagcggctggaaccggcgtcaccctggcgaccggcacggccacgcagctggttgtcgatacgacgcgattcatgacgctcggaggcgatcacctgcaggccaccggattccagcacggcctggtgacgcttctgccaatcggccttgatctgggcgatctgctcagggctcgggttttccagggccgcgacttccacttcccagttgccgcccaacaggatgtcggtaccacgaccggccatgttggtggcgatggtcagtgcgccagggcgaccggcctgggcgatgatctcggcttctttttcgtggaacttggcgttgaggaccttgtgctcgatgccttccttattaagcaggttggacacgtgctcggaagtctcgatggtagcggtgcccaccaggatcggacggccctgggccataccgtccttgatgtcgttgatgattgccgcgtatttctcttcggccgtcaggaacaccaggtcattgaagtctttacgcgccaaaggcttgttcggcggaatgaccatcacagacaggccgtagatctggtggaattcgaacgcttcagtgtcggccgtaccggtcatcccggacagtttgttgtacagacggaagtagttctggaaggtggtggacgccaacgtctggctttcagcctggatgttgaggtgctccttcgcttcgatggcctggtgcaggccctcggacagacggcggcccggcatggtacgaccggtgtgctcgtcgaccagcacgacctggccgtcctgcacgatgtactcgacgttgcgatggaacagcttgtgggcacgcaggccggcatacacgtgggtcaacaggcccaggttgtgcgccgagtacaggctttcaccctcggccaattcgccgatctgggtcagcatctcttcgacgaactggtgaccggcttcgttgagttcgacctggcgggtcttctcgtcgatgctgaagtgaccttctttggtcaccacgccttcgacttcctcgatgtgctgctccagacgcggaatcaacttgttgatttcggtgtacaggcgcgagctgtcttcggcctggccggagatgatcagcggggtacgggcttcgtcgatgaggatggagtcgacttcgtcgatcacggcaaagttgagttcgcgctggaatttttcatccatgctgaacgccatgttgtcgcgcaggtagtcgaaaccgaattcgttgttggtgccgtaggtaatgtcgcacgcgtaggcagcgcgcttctcttccggcggctggaatggcgtaacgacgccaacggtcaggccgaggaattcatagagcgggcgcatccagttagcgtcgcggcgggccaggtagtcgttcaccgtcaccacgtgcacgcccttgccggacaatgcgttgaggtaaacgcccagggttgccaccagggtcttgccttcaccggtacgcatttcggcaatcatgccttcatgcaaggtcatgccgccgatcaactggacgtcgaagtggcgcatgcccatgacacgcttaccggcttcacgggcgaccgcaaaggcttcgggaagcagcttgtcgagggtttcacctttggctatgcgggccttgaactcttgggtcttggcgcgcaattgctcgtccgaaagggcaaccatctgctcttcgaaggcattgaccagctgcaccgtcttgagcatgcgtttgacttcgcgctcattcttgcttccaaaaagtttctttaacaaaggcgcaaacatatcggcaggttcttccacacatagggatggagggcgcaccgtgagtggcccgagcagccctcacggccgcatgcgaacgcgcattctacccggaatcgtgggtgaggaaagtggcgttattccccgatgctggcatggtgctgtgagagggcctgtttaaaataagggcttttaccggaacttcaacccatggagcgcagaagttaccgattgatttcacgcacaaaagcccatggatgctttgcctggggagatgcagacgctttctgctaagatggcggctctgttacttaaggtgtccaacaatggcatttcgcccctcgccagcccgcgcgcctgccgtgttgcttcgcgatgccaagccgctgaaagccatctttggccatgcgcaacgcctgggccatctgcaacgcctgctcgaaagccaactgcaaccggccgcgcgcgaacactgccgcgtggcgtcctggcgtgaaggcaacctgctgctaattgtcacagatggccactgggcgacacgtctgcgttatcagcaaaaacgcctgcaacgtcaattgatagcgtttgatgaattcgccggtttgacgcgcattcagttcaaggtacaaccgcccaccaccctgcctggcgtggtgcagcacactcatgacctctcgacgaatgccgccgaaaccattcaggcaacggccgacgggatcagcaacccggccttgcgcgcagcccttgagcgactggcagcccacgccaggcccaagccctgagtctctatttgcgcttgctgccgcccagtaacgaccccaacaaaccacgtaccagttgccgccccatctgattggcggcctgctgcatcgccgatttcagcgccttgcctgccgtggtgcccagaaacgcaccggccctgtcggtaaaactcggctcgtcggtagtcggcttggtctcttcggtcgggccaagctccttgcgtgacatcagcacttcgtaagcggattcccgatcaatcggcttgtcataacggccttgcagcggcgaactggcgaccaacgcggcgcgttcggcttcgctgagcggcccgatgcgtgattgcggcggagcaaccaaaacgcgatggacgacttccggcgtgcctttttcctgcaaggtgcccaccaacgcctcacccgtgcccagctcggtcagtaccgacaaggcatcgaatgctggattgggccgaaacccctccgcgacggcacgcagggatttctgttccttggtggtgaacgcccgcaagccatgctggatacgcagaccgagctgggccagcacgctgtccggcaggtcgcccggcgattgagtgacaaaatacacaccgacgcctttggagcgaatcagccgcaccacctgttccaggcgctcctgcaaggccttgggcgtatcggcgaacaacaaatgtgcctcatcaaaaaacagcgccagcagcggtttttcggcatcaccacgctcgggcagttgctcgaacaactccgccaacagccacagcaggaacgtcgcgtataccttcggtgcctcgtgcaccagacggctggcgtccagcagatggatgcgcccgcgtccatcaccagtgggctgcaggatatcttccaactgcagggccggctcaccaaacaaggcttcagccccctgttgttccagcaccgccaggcgccgcaagagggcctggctggatccggtggtcatcagcgctgcgtcttcgcccagcaattccgggtgatagcgcaggtggttaagcagtgccttgaggtccttgaggtccagcagcagcaagccttcgcgatccgccaccttgaacgccgcgtaaagcgctgactgctggctgtcagtaagttccaacaggctaccgagcaacaacgggcccatttcgctgatggtggtgcgcaatggatggccggactgcccgtggatatcccacagcgtgaccggataagccttggccgtgtaattcaggaaaggcatgccggcgatgcgctcggcgaccttgccttgcggattcgccgcagcgccgagcccgcataggtcccccttgatgtccgcggcaaacaccgccacgccggcgtcactgaaggcttccgccaggcgttgcaatgtaacggtcttgcccgtgccggtggcaccggcgatcaacccgtggcgattggccaaccgcatggcctgggcgatgggctggccggaaaggtcggcaccgataagcagttgcgaggagtcaggcatttcgtcacccatggttaatctttagtgtcgccaagtcgatacaggcagatgtaagacccacaaagtctaaaaataggtcagatagttcctacagggaccaccggagctatcacaagaagtatcacaccttttttgacgctgtcattttgcgcatcccacaaggacgcgctttggatattaagaccttagcggaccctacaagccatgaataaaaatctgcgcttcagccacaaaatcctgcttgcagcctcccttatcgtcatcgcggctttcgcgctgtttaccctttacaacgactacctgcaacgcaacgccattcgcgacgacctcaacaattacctgcatgaaatgggcgacgtcaccgccagcaatattcaaacctggctcaccgggcgcattgccctggtggagaacgccgcacaaaacatcgccatcaaccccgagccttccgcagttgccagcctgctggagcagaaaaccctgacgtcctcattcatggcgacctacgtcggtgacagccagggcgcctttaccatccgccccgacaccaagatgccggacggcttcgacccgcgtgtgcggccctggtacaagggcgcccagagcagcaacggctcaaccctgaccgaaccctatatcgatgccgccaccggcaagttgatcatttccgttgccacccccagcacccggggtactcagagcatcggcgtagtgggcggcgacctgagcctgcaaaccctggtggataacattggcgcgctgaacttcggcggcatgggctatgcgtttctggtcagcgccgatggcagagtattggtacatccggataaaaacctggtgatgaagaccctggccgatgtgtatccgaaaaatacgccaaaaatcagcgccgatttcagcgaagtcgaggccaacggcaaggccaacatcgtgaccttcataccgatcaagggcctgccttcggtgaactggtacctcggtatttcagtagataaagacaaatccttcgccatgctcagcgagttccgcacctcggcggtcatcgccacggtgattgcggtggtgatcatcatcgccctgctgggcatgctgatccgcgtattaatgcaacctttgcacgtgatgacccgcgccatgcaggacatcgccgatggcgagggggacctgacgcgccgcctgaccatccagaatcacgatgaattcggcacgctgggtaacgccttcaaccgcttcgtggagcgcattcacacatcgatcagcgaagtgtcctcagccaccgaacaggtgaatgaggtagcactacgggtggtcagcgcgtccaactcgtcgatggtcaactccgacgagcaggccaaccgtaccaacagtgtcgccgccgccatcaatgaattgggcgccgccgcccaggaaattgcgcgcaatgccgcgcaagcctcccatcaggccagcgatgcccggcacctggctgaggacggccagcaagtggtcgagcgcaatatcaaggcgatgaatcagctttcagcgatgatcagcgcgtccagcagcaatatcgaagcgcttaacagcaagacggtgaacatcggccagattctcgaagtgatcaccagcatttcccagcaaaccaacctgctggcactgaacgccgccattgaagcggcgcgtgccggggaagcgggccgtgggtttgcggtggttgccgatgaagtgcgcaacttggcgcatcgcacgcaggagtccgcgcagcaagtgcagaagatgatcgaggagctgcaagtcggcgcccgggattcggtcagcaccatgagtgaaagccagcgccacagcctcgacagcgtggacatcgccaacctggccggcgagcgcctgaacagcgtgacccagcgcatcggcgagatcgacggcatgaaccagtcggtcgccactgccacggaagaacagacttcagtggtggagtcgatcaacatggacattaccgagatcaacaccctcaatcaggaaggggtggaaaacctgcaatccacgctgcgagcgtgtgccgaccttgagcaacaagcggcacggttgaagcagttggtcggtagtttccggatctgatcaggagtcctcaggctcggacttggcctgctcttgctcccacaactcggcggcaccgggaaattcggtgccgtcctcgctgctcaggtcatccgggtcatatcggctcaaacagccctcccctaaggttgccggggcttttgacgtggctttgtccaacggatcattcatcgctcaatcctcaagggcacgcaaagaaaaagggcccggaacgatttaacgcccaggcccttcattcttcaatcacaacaggtcggtcagaacaccaccgtcttgttgccgtgcaccagcacgcggtcttccaggtggtagcgcaggccacgggccaggaccatcttctcgacgtcgcggccgaaacgcaccatgtcttcaatgctgtcgctgtggctgacacgcaccacgtcctgctcgatgatcgggccggcgtccagctcttcggtgacgtagtggcaagtcgcgccgatcaacttcacaccccgcagggaagcctggtgatacggcttggcccctacgaacgacggcaggaagctgtggtgaatgttgatcaccttgccggcgtattcgcggcacagttccggcggcaggatttgcatgtagcgcgccagcaccacaacgtcagcctcgtgttgcttgaccaggcgggagacctcggcgaacgccggctccttgtcctgcgggttgaccggcacgtggtaatacgggatgccgtgccactcgaccatgctgcgcaggtcgtcatggttggaaatcacgcaagcgatctcgcagtccagctcatcgctgtgccagcggtgcagcaaatcggccaggcagtgggattcgcggctggccatcaacaccacgcgctttttctgctcggtgtcggtgatgtgccaggtcatcgaaaactcttcagcgatcggcgcaaacgcttcacggaaggcatcaagaccaaaaggcagcgaatcggcacgaatctcgtgacgcatgaagaaccaaccgctgagattgtccgagtgatgactcgcttcggtaatccagccgttgtgggaggccagaaagttactgactttggcaacgatgccgacccggtccgggcaagcaatcaccagccgaaaagtgcgcattagggggaaactccagaacttcgcaaaggccgccattctagcgattgcgcaggaaaactgcagtattcgttaacgtttattctgatcgccggccccagctttgtcccttaatagcctatggttttaccacccttatatgaatctgtgcggcataccacggctgttcccgcttttccaagcagattatctttgggtctacgccctagtaattaactcgaatgcatagcattgctacaaacattcaaagtaattcacataaatgcgagcttaaatgtttacttgaggaaaccgcctgactattattgggccactatccctgtcaatcagcgctctacataaggtagtccacatgtctctgatcaacgaataccgtgccaccgaagaagctatcaaagagctgcaagcccgtttgaagaacctgtcccaagacgacaaactgcaaaccgagctggaattcgaaggtaaattgcgtgccctgatgggtgaatactccaaatccctgcgtgacatcatcgcgctgctggatccagagtcgaaagttaaagctccacgcggcgccgtaaaaactaccggtaccaagcgtgcccgcaaagtcaaacagtacaaaaacccgcacaacggcgaagtgattgaaaccaaaggtggcaaccacaaaacgctgaaagagtggaaagccaagtggggcggtgacgtggttgaaggttgggctaccctgctgggctaagcctcatcaggtttgcgcctgacccgtgacacattaaaaacgccagcttgctggcgttttttattgtccgcatagtctgcgaaaaccgactacagattcattctggtcgctagagcgtccgcatactcctgccattggtccagcacctgagactggaacggtgtagcactaacagcaaactcaagccgagcctgtttaaacgcatcaagggtattcggcgcgccccattccgggctcgacaaacgttgctgacagaaaagtttccagcgcagttgctcctcgctgttcaacgtatcggggaagttgcgcgctcggtagcggaataataattcaggcaaacgctcgtcatcaaaaggccactgctggcgcgctaattgcgcaggctcagcggtccggacttgttcacataaacgccggtcacggtctccgataaaaccgccgtaaagctgttgctcaggatccgaactcggcgtgaagtcttcgtgcgcgtaaatggccgccaacttatcgcgccaaagttcctgtgcgtcagttagccgcagcgcccgttcctgaaaaatattcatgtccaagtgcagacgctcacgatcttctgcgcgcagcacattcaagggcgccaccacggggcagcggttgatatgcaccaatttgagggggaccggcaattcaccgtcggcgagatcatcacgacgggtatagaggcgctggcgcaaggcctcggcatcaaggtccagcagcccctgcggatcgagtccgaggtcacagacgatcaatgcattgcgattacgcggatgccatgcgagcggcagcacaacacccaggtaatgacgttcggcagaaaaacgcccggaaatatgcaccattggctgcagcagacgcacctggtccattacccgttgcttgctgcgcagctgaaacagccattcatacaacttgggctgtttctcacgtaccagccgagccaacgcaatcgtggcacgcacatcggacaacgcatcgtgcgcctgaccatggtcgatcccattggcttcggtcagacgctccagcttgagcgtgacgcgcccatcctgctgcggccattcaatgccctccgggcgcagggcgtaggccgtgcggaccacgtcgatcaaatcccagcgactgttaccgccctgccattctcgtgcgtaggggtcgaaaaaattgcgatagaggctgtagcgcgtcatctcgtcatcaaaccgcagcgtgttgtaaccggcaccgcacgtaccgggggcggccagttcagtgtgcacccgagtcatgaagtcggcctcggccaagcctttttccgcgagtattacgggcgtgataccagtgatcgcacacgcgatggggtgcggcaggatatcgtcgctgggctggcaatagagattgaccggcgagccgatctcgttgagttcgaggtcggtacgaatgccggctacctgaagcgggcgatcgctgcgcggattgatgccggtggtttcatagtcgtaccagaaaatggaggtcacgggttgttcctgtactgaagatcgacaaagtctaggcgctgaaaggcttccgcgaccagcaccaaatacactgtacaaacatccagcaaactcttgaatggttgcttccatccccgacactgctagcatccgtgtcttccagccactctgcactgccaaggatcgcgatgccgtcagccccattggacacccgctaccagatcgagaccccggagggcatcgacctgcccctgcgtccggccggcctggtgccgcgcgtgctcgcctttgccttcgacctgggtgtacgcggggtgatcatgggcgttctgttggtgccattggctttgcttggcaacgtcgggatcggcctgggagcgctgctgctgtttttgatcagttggtggtacatggtgctgttcgaggtgctcaaccagggttgctcacccggcaagcaggttatggggctgcgtgtcgtacaagatgacggcactccgattggctggtccgcttcactgattcgtaacctgctgcggtttgtggacatgctgccgttcggctactgccttggcgcgatcagttgcctgcagcacccccacttcaagcgcctgggcgacctggccgccggcacactggtgatctaccgggaacaaccgctggtacggccccagattcctcaagcaacagccctgcgcttgccctttgccctggatttgagtgaacaacgggcgatccttggttttgcggaacgccaaggggaactgtccaccgagcgtgttcacgaattggcctcgattctcgccgcgcccttgcaggtatcccccgaccgcgctgcggaacaactcaatggcgtggcccgcggcctgctggggccgacatgaaacagagccttttcgaaagccgtcaccaacgccaatggcaaaccttcgccgagcagctcacacagttggagcaagggcaggccaaagccgctgaagtggccgatttccctcatcaatatcgacgcctgtgccagcacctggccctggcccaggaacgtggctacagcagctacctggtagacccattgcaacaactggccctgcgcggccaccaacaactctaccgtcatcgcagccaactggcggcgaatgcgctgagctttgtactcgccgattttcctcggctggtacgggaacagtggcgtttcgtgctgatcgccagcctgctgttcttcggcagcctggtgggtattgccctgctggtctacctgtttcccgacctgatctacagcatcgtcagcccgcaacaggtggccgagatgcaggccatgtacgaccctgatgcaagccgcctgggccgcgccgccgagcgtgcatcaagtgaagactggatgatgttcggctactacgtgatgcacaacatcggtatcgcgttccagacgtttgccgccggtttattgttcggcctgggcagcgtgttctttctgattttcaacgggctcatcatcggtgcggtctccggtcacctgaccgagatcggctatggccagaccttctggtcattcgtcatcggccatggcgcattcgaactgaccgcgatcgccctcgccggtgccgcaggcttgcagttggggtgggcactgatcgcccctggacaactgacccgtggtgaatcattgcggctggctgcacgcaagagcgtgcgaatgctgtgcggtgtcatgctgtttctgctgatcgcagctttcatcgaggcatattggtcatccaccaccgtgataaccccgtggatcaaatacctagtgggcgctgttctgtggctgctggtgggcacttacctgggctttgccggaaggaatcgccatgcgcctgactgatgccagtgtggtcatccggccgcgtactgcctgggaagccatggatcttggcgccttgatggcacgggagcatcgcgtgctattgatgggcagttgggcgttagtcaccctacctgtgttcgccttgcttacagccctgctgtggcagtatccgtccaccgccatatttcttttctggtggctcaagccggccttcgaccgcttgccgctgtacattctgtccaaggccctgtttggtgaaacgcccactatcaagcacgctgtgcgccagtggccgcgcctcctcaagggtcaactgctggccagcctgacctggcgacggttcagcctgagccgcagctttgtaatgccggttagccaactcgaaggcctggacggcccggcacgccagaaacgcctgggcgtgttgcagcaacgcaatgccggagccgcacgctggctcaccatcatcgggatgcaccttgaaatcggcctgtggttcggctgcatggcactgttctatctgttcatcccgcaaaacctcgagatggactgggactggcaacgcctgttgttggcgacaagctcggaagggttgtggctggagcacctgggcaacgcgttctatgccttgctcctgatattttgggaacccatctatgtcgcctgcggcttcagcctctaccttaatcgtcgcaccgtattggaagcctgggatctggaactggtattccgacgcctgcgtcaacgcctgagcaatgtggcaccgatgttgttgctgatgatcggactgatgctgctgcctctcagccttcccgtcatggccgatgcttccagcccctccaagccactgagcactccgagcgcgagccaatccatcaaatcgctgctggacaagccgcccttcaaaaacccggaaaccgtgacccgttatcggtttggagaagaaaagccagccggtaaaaacaaaacgcccaataacggcagacttcccgattggctgaaggccttgctggacaacctcaacagcaataccttcaagcacatcgcccaaggcctggaaattctgctgtggagcgtgttcattggtagcctgatcatgcttgtgtggcgctatcgcgagtggttgcgcacctttgtcagcagacgcggaccgcgcaagacagaggttgtcaaaccgctgcccacgcagttgttcggccttgaactgggcaccgaaaccttgcccgacgacgttgccggcgccgccgaacacctatgggccacccaccccagggaagccctcggcctgctgtaccgaggcctgctcagccggttgttgcatgatttcaacctgccgttgaaagacgctgataccgaaggccaggtcctggcacgtgtacaccagttgcaacacccccaactgctggccttcagtgatgagctgacccggcattggcaaaacctcgcctatggtcaccacctcccagcgctccctgcccagcagaaactatgcagtgattggcgcgccctgttcagtccagggagcaactgatgaatcgtccattactgtgggtggggttattgctggcatgcctgcttggagcgggcggttactacgtgtggagcaaggcgattccctatgacgaagtggtggatcgtggtccttcgccggaggcactggccaatccctatctggcggccgaacactttctgcgtcaacaaggcctcaccgtggaacacgccaatagcctgaaacggctgggcaccctgccttccaaaggcaacagcctgctgctgctcggcgaacgcagtaacctgtcaccacgccaggtagaacagttgctggcgtgggccagatccggcggtcatttgcttgtggtcgccgaggcgctgtgggatgaagagacaggcaaaagcggcgacctgctgctcgatcgcctgcatattcaccagaccttgagtgacgagcctgaagaatctgccacttccgtcaagaagccctcgaagatgaaagccccggacctgaccaagctctatgtcgacaatgaaaccgcatcggcttacttcagtttcgacacagatttcaacctcaccgaccccaggcacctggctcaattttccgctaacagcgcgagggccagccacctgatgcagcttgacctcggggaaggccgcgtcacagtgatcacggacagcgacctgtggaaaaccccgaacatcggaaagcacgacaatgcctggctgctctggtacttgaaccagggcaccgccgtgaccttgctgttcaacagcgatttcgacgacctgcttagcttgctgatgcgctatttcccccaagccctggtcgcactcgttgccctcgtcgccttgggactttggcgtgccggcgtgcgtcaaggcccgatccagcaccccgcttcccctgctcgtcgccaactgcaggaacatctgaaagccagtgccgacttcctgctgcgccgcagcggccaaggcacactgctgcagactttgcagcgcgatatcctgcgtgcggcccgacgccgtcaccccggctttgaacacctcgacaacgcagaacagtgccgggtgcttgaacacctgacgcgccaaccccctcacgtgatcaaccaggcccttggcccactcccggcaaaacggctttccagcgccgacttcagccggcaggtggcgtgcctgcaaaccctcaggaatgccttatgagtgatttcccaagcgccactgccttgacccgcgaatccctgcaacgcgccactgggcaagctcaagccctgcgaaccgagttgcgcaaggcggtgattggccaggacgcggtgatcgacgatgtcctgaccgcactcatcgctggcggccatgtgctgctcgaaggtgtgccggggctgggtaaaaccttgctggtacgtgccttggcacgctgcttcgagggcgatttcgcacgtatccagttcaccccggacctgatgcccagcgatgtcaccggccacgccgtgtacgacctgcacaccgaacaattcaagctgcgcaaggggccggtgttcactcatctgttactggccgacgaaatcaaccgtgccccggccaagacccaggcggccttgcttgaggccatgcaggagcggcaggtgaccctcgaaggcgaggcgctgcccatcggccaaccgttcatggtactggcaacccagaaccccatcgaacaggaaggcacctaccccctgccagaggcggaactggatcgcttcatgctcaaggtgcgcatggattaccccgacgcgcagcaggaactggacatggtgcgcgaagtcacacgctcgtcgcgggccgacatgctggatgtacacccattgcgcacggtgttgcaggccgaagatgtgctgcaactgcagcaggttgccagtgaccttgccctggacgaacaggtgctcgactatgccgtgcgcctggcgcgcgccacccgtaactggccaggcctggcgatcggtgctggcccacgggcgtccattgacctggtacgcggcgcccgcgcccgcgccttgttgcgcggtggtgagttcgtcacgccggatgacatcaaggaatgcgccctggcagtactgcgtcaccgcgtacgtatcgcgccagagttggatatcgacgggctggaggtcgaccaggtgctcaggcaattgctcgatcagattccggcacctcggcaatgactcgcctatgaagccgacccgtctgctgttgaactggctcggcgcattgctgggtctgggcatcctgctgggcactgcggcagcgttgcagctcacagtatcggacaccttgcactcactcgtctggggattactcctggcgttgttgctgttggccatgctggacgccgtacgagggcatcgccgcccctctccgcgtatacaacgacagatgcccggcagcctggcgttggggcgctggggcgaaatccgcctggccctggaccacgacttcccacagccgctgacggtgcaggtattcgatcatgcccccgacgggttgagcgtggagaacatgcctcagtccataaccttgtatcccggtgaacgctgcgaactgggctaccgtcttcgccccctgcggcgcgggcatttcagtttcagccgctgcgaagttcatctgcccagccccatggggctatggtctgcacgacgctatatcgaggtgaacgacaccacccgcgtctacccggatttcgcccgactgtacggcgcccaactgctgggcgtagacaactggttgagccaattgggcgttcgtcaacgccaacggcgtgggttggggctggagtttcatcagttgcgcgagtttcgcgaaggcgacagcctgcgccagatcgactggaaagctactgcccgacaacgcacccccatcgcccgtgaataccaggatgagcgcgaccaacaaatcgtgttcatgcttgactgcgggcggcgcatgcgcagccaggatgacgaactgtctcactttgaccatgctctcaatgcgtgcctgctgctcagctacgttgccttgcgccaaggcgatgccgtggggctgtgcacctttgccggtgaccagtcgcgctacctggcgccggtcaagggcagtagccagttgaacctgttgctcaatgcggtgtacgacctggacaccacccgacgcactgccgattaccaggcggcggcaagtcaactgctggcccggcagaagcgtcgagccttggtcattgtggtgagtaacctgcgggacgaggacgatgaagcactgttgactgccgtcaaacgcatcagtcgccaacataaggtgctggtggccagcttgcgcgaggaggtactcgaccaactgcgccatacccctgtgcaaaccttgcccgaagccctggcctacagcggcaccatcgactacctcaacacacgggatgagttgcatgaccgcctgagcgcgcacggtttgtccgtgctggacaccttgccctctgagctgggccccgcattggtgacacgctacatgggttggaaaaaagccgggaccctctgaggagaaaggttctgaaaagaaacactcgaccacggcagggcataaagcccctgaaccgggtcgagagcatgttgccgctaagccgaagcctgcaaaggatcaaaactgaagtaatgcaacaacacgttgatcaattgcccatactcctccggggcctgctgcacactgaacccggagtcgtaatgctgggggttgatatcttcgtgactccacaggcaggtagccgtgagatcaattggatggaaggtgccgtcagcctccggaatcttcaagcgcagctcgaaatccacgtcgaccatcatgggcaattggctgatcaacatcagcccatcttccgatacattgcccaaaaagccgatgggcttatcggtgagtcggttaaacacttgcaggaaataaggtagctgatgccgctcgatccgtcggtcggtaaacatggtgagatcgccatccagtggccataactgcggccgtgccagtgattcggaacgagaaaataacgcccgctctccatggatctcggtacgacaacaggcaatagtccgccgccagaacagctaccgaatccgggccccacattcgtttgcatggaaacttgtacaaacgaacatccaaaggatagcccaagactggcaacaggccagttatgaaatgacgaatatcatcacaacgaagcgggacgtggctgggcgacacttgcaccggggtaatgccccagctgctgcaaggtatcgagcctcgcacgagcacgataggcgtactcactcgacgggtactgattgatgatgaattgataggtctgcaccgcatcaacgaacagcttttgccgttccaggcactgcccgcgcaacatcgagacctccggctgcacatagcggcgcgtgcggctttcacggtcgacctgggataactccagggtgacacgctcgcaatcgccgaccttgtaggcacgataggcattgttcaaatgatggtccatcgaccaacgggtgcagccgacaacactgacggccagggcagcaacgagcaaaattcgcatgagggttctcctgtcttgtgcagtgtatcgacccctcgtcgaaaatcttcaaggatgttcgtattcagccgcagcgaaaacaagtcaatcatcgataagtagtgcaaacgaacaatgactacaacgaaagagcatagtagccttcctcagcgcttgaactcaggagtctgtgcatgtccgtccgtcgtaccaaaatcgtcgccacccttggcccggccagtaactcgccggaagtcctcgaacagctgattctggctggtttggacgttgcccgtctgaacttctcccacggcaccccggacgagcacaaggctcgcgccaagctggtgcgtgacctggctgccaagcacggccgcttcgtggcactgctgggcgacctgcaaggccctaaaatccgtattgccaaattcgccaacaagcggatcgagttgaagatcggtgacaccttcaccttctccaccagccacccgctgaccgaaggcaaccagcaagtcgtgggtatcgactacccggacctggtcaaggactgcggcgtcggtgacgaactgctgctggacgatggccgcgtggtcatgcgcgtcgataccgccaccggcaccgagctgatctgcaccgtgaccatcggcggcccgctgtccgaccacaaaggcatcaaccgtcgtggcggtggcttgacggcaccggccctgactgaaaaagacaaggccgacattaagctcgccgctgaaatggaagtggactacctcgccgtgtccttcccgcgcgacgccgccgacatggaatacgcccgcaaactgcgcgacgaagccggcggtaccgcctggctggtggcgaagatcgaacgcgccgaagccgtggccgacgacgaaaccctcgacggcctgatcaaggcttccgacgcggtgatggttgcccgtggcgacctgggcgtggaaatcggtgacgccgagctgatcggtatccagaagaagatcatcctgcacgcacgccgccacaacaaagcggtgatcgtggcgacccagatgatggagtcgatgatccagaacccgatgccgacccgcgccgaagtgtccgacgtggccaacgccgtgctcgactacaccgacgctgtgatgctgtcggccgaaagcgccgccggcccgtacccactggaagccgtgcaggccatggcgcgtatctgcgtcggcgccgaaaagcacccgaccagcaagacctccagccaccgtatcggcaaggtgttcgaaagctgcgaccagagcatcgccctggccgccatgtacaccgccaaccacttcccgggcgttaaagcgatcatcgccttgaccgaaagtggctacacgccgttgatcatgtcgcgcatccgttcctcggtgccgatctacgcgttcactccgcaccgcgaagcccaggcccgcgcggcactgttccgtggcgtgtacaccattccgtttgatccggcttcgctggcaccgaacgaagtcagccagaaggcaatcgacgagttggtcaagcgcggtgtcgtggagcaaggcgactgggtcatcctgaccaagggcgacagctaccacaccaccggtggcaccaatggcatgaagatcctgcacgtgggcgacccgcaggtctgagtgacacgctgaaaaacaaaagccccgccatgaaaatggcggggctttttgcatttcagggaagctgttgtgtgatgccaaaggacctcatcgggggcaagccccctcccaccttttgaccgcgctgcctatcaaatgtgggagggggcttgcccccgatgaagcccgatcaaccaccacacgttcatcgccgggtgataaacgctgacaacgccgcaatcgcctcaggcgacttcaaccgttgggtgaacaaagcgccctcctcctcgatcacctgccgcaactgctcgcgatccacactcttcatcaactgcttggtgacctgcaccgcccccggcgccagggtctcaaaacgctcggctacttcccgcgccttggccaatgcagcctcgccactgcccagcgcttcggtggcaagcccccacgccgctgcctgttcgccgctaaacccctcgcccagcagcagcaattcggcggctttcgcgtgccccagcaacctcggcaaaatcaggctggacccgaactccggacacagccccaggttgacgaacggcatgcgcagccgcgcatcgcggctgatatacaccaagtcacaatgcagcagcagggttgtgccaatccccaccgcagcccccgccacggcagcaatcactggctttctgcaattgagcaggcttttcatgaagtgaaacggtgggctgtcgaggtcgttgggcggctgttcgagaaaatcgctgatgtcgttgccggccgtgaaacactcattgctgccctggatcagcacgcaacggatatccgcgtccgcgtcggcgtgctccagtgcattggccaattgcgtgtacatggcacgggtcaaagcatttttcttgtcgggacggttgagctgcaggatcagcagcccgcgttcgcgcacctgttggatggtatcggtcatgacgagtctcgcggcgggaaaaatcagcgctcaaccacgaggcagaaacacatcggccagcagctgattacgcggcaatcctgccaggaacaggcgcttggaaaacgcctcgacgctggctgggtgcccgcagagtaaggccagcgtttgccgcgaaacaagccgcagttgcgccaatgcctgggccacctgcgccgccgtccacagttccaccgacacgtttggatgctgtgcagccaactgcgccaagggttcggccagataatggccttcggcatcatgggccaggtgaatcacgcggatggcgccctggtgatcctggcgcagcgcctcacgcaacacgccccacaacggccccaacccggtgccggacgccagcagccacaatggccgcgtttgccagtccggatcatattgcagcgcaccgccgcgcaaatcacccaggcgcagccgatcacccacctgcaactgccgggcaagatcgctgaattcgcccggcaggcgacaatcgagatgaaactccaggaatggatcttcctggggcaagctcgccagggaatacggccgcgccacctgcccggcccacaacaccaggtgctgcccagcccggtaacgcaaaccgcgctccggttgcaggcgcaggcgcagtacgttcgggttcagccaatcgacacccaccacctgggccggcaagccatcacgcgtcgggtcaaacgcttcaacccgcagatcgccgctgacctgacactggcaggccaaccgccagccgtcctggcgctgcgccgggctcaaggcttcgggctgcttgtcttcgacctcgccctggcaacgcaccaggcaggcatggcaactgccggcgcggcaactgtaaggcacggccacacccgcctggttcaaggcatccagcaggttgctgccgggggttaccgaccaatggcgttcgccgacgtacagttcaggcatataaggactcagtcacaaggggcgcgcacagggaatcatgcctgcgacagtttgaccatagtcgggtgtatcggccaccgcgccgggttatactgccgcgcctttttagcgtcgcgcctgcaccactttggcgtgccttggaaaggtggacccagccgaccgatgcaacactgggcccacctttattgaatgttcccttatagaggagcgcgactcatgaccgtgatcaagcaagacgacctgattcagagcgttgccgacgccctgcaattcatttcctactaccaccccgtggatttcatccaggccatgcacgaagcctacctgcgcgaagaatcgccagcggcccgtgattccatcgcccagatcctgatcaactcgcgcatgtgcgccaccggccatcgcccgatctgccaggacaccggtatcgtcaccgtgttcgtgcgcgtgggcatggacgtgcgttgggatggcgccaccatgggcctggacgacatgatcaacgaaggcgtgcgtcgcgcctacaacttgccggaaaacgtcctgcgtgcatccatcctggccgacccggcaggtgcacgtaagaacaccaaggacaacaccccggccgtgatccactactccatcgtcccgggtaacaccgtggaagtggacgtggcggccaagggcggcggttccgagaacaagtcgaaaatggccatgctcaacccgtcagactcgattgtcgactgggtgctcaagacagttccgaccatgggcgccggctggtgcccaccgggcatgctgggtatcggcatcggcggcaccgccgagaaagccgcagtgatggccaaggaagtgttgatggaatccatcgacatccacgagctgaaaaagcgcggcccgcagaaccgtatcgaagagatgcgcctggagctgttcgagaaggtcaaccaactgggcatcggcgcccaaggcctgggtggcctgaccaccgtgctcgacgtgaagatcatggactacccgacccacgccgcgtccctgccggtgtgcatgatccccaactgcgccgccacccgtcacgcgcattttgtgctcgacggttctggcccggcgtcgctggaagcgccaccgttggacgcctacccggaaatcgtctgggaagccggcccgtcggcccgtcgcgtcaacctcgacaccctgaccccggaagaagtacagagctggaagccgggcgaaaccgtgttgctcaacggcaagatgctcaccggtcgcgacgccgcgcacaagcgcatggtcgagatgctgaacaagggcgaaaccctgcccgtggacctgaaaggtcgcttcatctactacgtcggcccggttgatccggtacgcgaagaagtggtcggcccggctggcccgaccaccgcgacgcggatggacaagttcacccgtcagatccttgagcaaaccggcctgctgggcatgatcggcaaatccgaacgcggcccgactgcgatcgaagcgatcaaggaccacaaggccgtgtacctgatggccgtcggcggcgccgcttacctggtggcgcaagccatcaagaagtcgcgcgtagtcgcgtttgccgaactgggcatggaagcgatctacgagttcgatgtgaaagacatgccggtgaccgttgctgtcgacagcaagggcgaatccgtgcacatcaccggtcctgccatctggcagaaaaagatcagtgaaagcctggcggtagaagtgcaataagcgcttcccctccaaacataaaggcgactgcggcccatggcccagtcgccttttttatggcacatgctatggtgcactccccttaccgtgcctgcccatcaccgtatgatcgcgatcccccgccccctgcgcctgaccttctactccctgctgatcatcgccggtgccctgctggccgcagccttggccactcgccacgccgaacgccaggccctggtggacgatgccgcccgtgccaatcagcaactggcactctatgccaactcgttgcacaccctgatcgaacgctaccgcgcgctacccgccgtgctggcgctggactcggaaatgatcagcgcgttgaaaggcccgctggacgccgccactcaggacgtgctcaaccgcaagcttgaacgcatcaatggcgccgcgcagtcctccaccctggaattgatggatcgcaccggcctggcggtggccgccagcaactggaacctgccgagcagttatgtagggcataactatgcgttccggccttacttcagccagaccttgagccagggcaccgggcgtttttatgcggtgggtgtgacgaccggcatcccagggtatttcctctccagcgcggtgctggatgaacacgagcagttcctcggcgccatggtggtcaagctggaatttcccgagcttgagcgtgaatgggcccagggcaatgatttgctgctggtcagcgatgcgcggggcatcgtgtttatcgccaaccagcccggctggcgttatcgcaacctgcgtccgttgtcggccaacgacctcgccgagctgaaagccacccgccaatacgacaaaaaacaactgcaggcgctggagacccagaccctgcagcgctttgacgaaaacagccacctgatgcgcgtcaacggcccggacggcaatgccaattacatctgggagtccttgccgctgaaagccgaaggctggaccctgcacctgttgcgcaagccccagttcgcctttgaagatcaacgcaacgccggcctggcggccgccggttcctggctggcgttggtattcctagtgctgttcctgacccaacgctggcgcctggcccgcttgcgccagcgcagtcgcgaagagcttgagcaactggtggaagaacgcacccaggcgttgcgcaccgcgcaggatggcctggtgcaatcggccaaattggcggcgctggggcagatgtccgccgccctcgcccatgagatcaatcagccgctgacagcccagcgcatgcagttggccaccttgcgcctgctgctggatcacggccgcgtcgacgacgcctaccaggccctcacgccactcgacgatatgctcacgcgcatggccgccctcaccggccacctcaagaccttcgcgcgcaaaagcccgagcggcctgcgtgaacgcctggacctggccaccgtggtcgaccagtccctgcacctgcttgacgcccgcctgcgcgatgaggcgatcggcgtggtgctggacctgacccgacctgcctgggtgcgcggcgatgccatccgcctggagcaggtgctgatcaacctgctgcgcaacgccctcgacgccatggccgacaaaccgcgcaaacgcctggaaatccgcctgcacgccgatcagcagctgtggcaactgacggtcagcgacagcggcggcgggattgccgaagaacacctgaacagtgtgttcgacccgttctttaccaccaagccggtgggtgacgggctcggtttggggctggcggtgtcctacgctatcgtgcacgaattgggcggtcgcctgatcgccggcaaccgtggcgacggtgcggtatttaccctgactctacccatcgcgctggagacgcccgacctatgttgaacgcggtgattgtggtcgatgacgaagccagcatccgcacggccgtcgagcaatggctgagcctgtcaggctttgaggtgcagttgttcagccgcgccgacgaatgcctggcgcaactgccccgtgatttccccggcgtgatcctcagcgacgtgcgtatgccggggctcagcggcctggagctgctggccgaagtgcgacgccgtgatgccgatctgccggtgattctgctcaccggccatggcgatgtaccgatggcggtcgaagccatgcgcgatggcgcctacgacttcctcgaaaaacccttcagccccgatgccctgctcaacagcctgcgccgtgctttggacaagcgcgggctgatcctggaaaaccgtcgcctgcaccaacaggccgatcatcgggcgcaattggaatcgacactgctgggcgtatcccgaagcttgcagaccttgcgtcgccaggtgctggacctggcgaacctgccggtcaacgtactgatccgtggcgagaccggcagcggcaaggaaatggtcgcgcgctgcctgcatgatttcggccctcggtcaaagaagccttttgtagcgctcaattgcgcggcgatcccggagcagttgttcgaggccgagctgtttggtcacgaaagcggcgcgtttaccggcgcccagggcaagcgcatcggtaaactggaatacgcccacggcggcacgttgttcctcgatgaaatcgaaagcatgccgctggcccagcaggtaaaactgctgcgtgtgctgcaggagcagaagctggagcggctgggctccaaccagagcatccacgtggacctgcgcatcatcgctgccaccaagccggacctgctggaagaagcccgcgccgggcgctttcgcgaagacctggcgtatcgattgaatgtcgcgcaattgcgcctgccgcccctgcgggagcgtcgcgaagatatcccgttgctgttcgatcacttcgcacagagtgccgccgaacgcctgggccgcagcgtcgagccattgagcggcgcgcagttggggcgcttgctcagccatgactggccgggcaacgtgcgcgagttggccaacgtcgccgaacgccaggtgctgggccttggcgacccggaaccggaaggcatcgaggccggacagtccctggccgcacagcaagaggccttcgaagcgcactgcctgaaagccgcgctgacccgacacaagggcgatatcaaggcagtactggccgagctgcaactgccgcgtcgtaccttcaatgagaagatgcagcggcatgggttggtgcgggagatgtttctctaggcgaatccttgtgttgactggcaggccgctatcgggggcaagccccctcccacattttgatttgtgaacgcgctcaagtgtgggagggggcttgcccccgatgaggacagcagccataagcggatttccgctcacccccctgaaaatcatcagcgactttccgctcaaaaaaatcaccaaacccttctaggccgggccttcatccacctggcacagctcctgctatagctcgagccaggctgcgcacgcgccgctccataaaaacaactagatgaaggatccttcaatggataactccaacgccctgcctctggggtcggcggccgcgccgacgaaagagcgcactacctccagccgcatcaaatcgattttcagtggttccgtcggcaacatggtcgagtggtacgactggtacgtctacgccgctttctcgttgtacttcgccaagactttcttccccaaaggcgacaccaccgcccaactgctcaacaccgccgcgatcttcgccgtgggctttttgatgcgcccgatcggtggctggctgatgggcctgtacgccgacaaggtcggccgtaaaaaagccttgatggcctcggtctacctgatgtgcttcggctcgctgctgattgccctgagcccgggctatgaaatcattggtatcggtgcgccgatcctgctggtctttgcccgtttgctgcaggggctgtcggtcggcggcgaatacggcacctccgccacgtacctcagcgagatggcgaccaaggaacgtcgtggtttctactccagcttccagtacgtgaccctgatctccggccagctcatcgccctggcggtgctgatcgtgttgcaacaactgctgaccaccgagcaactgtatgcctggggctggcgtatcccgttcgccatcggtgccctctgcgcggtggtggcgctttacctgcggcgcggtatggaagaaaccgagtcgttcaccaagaaggaaaaagccaaggaaagcgcgatgcgcaccttgatgcgccaccccaaggaactgctgaccgtggtcggcctgaccatgggcggtacgctggcgttctacacctacaccacctacatgcagaagtacctggtgaacaccgtcggcatgagcatttccgactccaccaccatctcggcggcgacgctgttcctgttcatgtgcctgcaacccattgtcggcgggctgtcggataagatcggccggcggccgatcctgatcgccttcggcatcctcggcaccctgttcaccgtgccgatcctcaccaccctgcacaccatccagacctggtggggtgcgttcttcctgatcatggcggcgctgatcatcgtcagcggctatacctcgatcaacgccgtggtgaaggccgagttgttccccaccgaaatccgcgccctgggcgtgggcctgccgtatgcgctgacagtgtcgatcttcggcggcaccgctgaatacatcgcgctttggttcaagagcatcggcatggaaaccggttactactggtacgtgaccgcgtgcatcgcggtgtcgctggtggtctacgtgaccatgaaggacacccgcaaacactcgcgcattaccaccgactaaacgtcagttgcagtcaacctgtgggagggggcaagcccctcccactttttaaatcaggacaagtcagctatcgccttacgtccgtaccgccgctgcgcgtacgacgcccccgcaatcatcaccaccaacaccgccgccaaaactgccgacgaaccgatggtgccgaaatccagcccacccttctcatggggcttggtaaggaagtcacccaaggtcgcgccgaacggccgggtcagtacaaacgccacccagaacaacagcactgaagaaatcctggtgaagtatttgagtgccaccaccgccgcaatcgccgagccgatcaacaacgcgccgccggcaaaacccagccctgagtcatctgccaggaaatcgcccaacgcggtgcccaaggtgttggagaacaggatggccatccagtagaacaactcaccccggaaggtctgcaccttgttcacgttcagcgaatcgccgctgaggtgccacaacgcgaagatgatcatcaggatcgcgaccaggatcatggagcccgcggcataacccagccccaaggtgcggtccatgaaatccgacatggtggtgcctgcggtgctggtggacaaaatcacgatccagtacagcaccgggttgtaggttttcgagcgcagttgcgtcaccagggtgatcaggaacacgctgatcagcatcatcgaactgatggcataaccgacattgagggtcatcgacagcaaatccccggcggtttcgcccagggtggtcgcgcagattttcatgacccagaacgccagggtgatctgaggaagtttattcataagggggaaggctccaaagctcagtctctcaataggccgacttatcgggttgtcgacagtgggcgcagactgacggtggagctgtgaaaaataggtgggcgatgaatgaaaattccatagtatggccacttcatcgacgaccactgcaggagccccggccatgcccgacgatatccacttctacgaacccgccaacggccacggcctgccccatgacccgttcaatgccatcgtcggtccacggccgatcggctggatttcgtcccacgaccgcgaaggccgcctgaacctggcgccctacagttttttcaatgcgttcaactacattccgccgatcattggattctccagcgtcgggcgcaaagacagcctgaacaacatcgagcagaccggcgagtttgtgtggaacctggccacccgcccgttggccgagcagatgaaccagagttgtgccccggtatcaccggacgtgaatgaattcgaattgtccgggctgaccccagtggcctcgaagatcgttggtgtaccgcgggtgggcgagagcccggtgtcgttcgaatgcaaggtgacgcagatcatccagctgcaacgtgccgacaaagagttggtgccgagctggctggtgctcggtgaggtggtcgcggtgcatattgccaagtggctgctcaaggatggcatctacgacaccgccgccgccgagccgatcttgcgcggtggcggaccggcggattacttccagctggggccggaggccctgttcaagatgtatcgcccaggcgccggcaaaccttgactgaaacacaataaaacgtgggagggggcttgcccccgatggcaatggcacatccaacatcgttgttgactgacacactgctatcgggggcaagccccctcccacattggattgtcggcgttgctcagttggcggcgctcgcccaggtcagctgcccctcttcatccacaccgatcagccgttcaagctgcacggtggctgcatcatcggcatcggcggccgtcttgaacgtctgtccgtccaggattttgtgaaactgcggggcacccatgccatcgagtgccttgacggcgacggcggcgctgtagcccccttcacccggtactacggcggatacggcttcgtggtgggcaaattgtttacgtgccatgttgcaggtcctggccaatggaaagtcggccattctagaccttcagccggcgagttgcaggtactcgccgtaggcgtgtgcggcggatgcatcggtaaaggtctggaagtccatgctgcgcacgaccatgtcgttcaacagctcggtaaagatcatcagcgctggagaattgaagtaggcgctcatcgcctgttcgctgctccagaaaccggagatcaaccatacatcgggatcgacctgggaatgctgcaacgagaattgcaggcaaccctgagcctggcggcccggttcgatcaaactgctcaagcgtgcaccgagttcggtgctgcacccggtgcgggcgcggataaaggccatatggctcgcgggaatgggggtggacatgttcgactctcccgttgagaagtgatgctcggcaagcactgtgagggcgtgttgccacaggatcaaagataacggcgcgggtagtcgcgcggttagtcaattcctgtcggcttattgcacaatcctgcgagaagcgtaggggggacgttcggcacagcggttttattccagggcccaacgccttgtttcagggagatgacaggtgccgcgattgcctgattcacgatgtatcgcaggatcaggcaaggattgtgcagaatcgacgtaacactgtttgaaaagccgccgctaagctgaacccatcgaagtagcccctagaggacgttccatgtcgtcgcccgaacataaagccatccccctcgacgccgagatggaaaaacagcgcgccgaactggccagcatcgtgcaccggcatacctgggaggacggctcctacggtacggccatcaccactctgtttctgaaccgccacaacaccccgcgcgacttcatgccggtgctggtggaaccggccctgtgcatcctggccagtggcagcaaggaagtccgcctggccgacgagatctttgcctacgacccgctcaactacctggtgttctcggtggcgatgccggtggccgggcggatcatcgatgccacgccggaagacccgaacctttcggtgcgcatcaatatcgatccggcgcaactgacagccctgatcgcagaagcaggcccaatgggcgtgccgtcgcgcccgacttctcgcggcatgtacgtcgatcgcatcgacggtcaactgctggacgccgtactgcgattggcccgcctgttggatacgccgaaagacatcgccatgctcgcgccgttgatcaaccgcgagattctttatcgcctgttgcgcggcccgcagggttatcggctgtatgaaatcgccgtggccaacagtcagagccatcgggtcagccaggcgatcaagtggttgaacggcaactacgaacaaccgctgcgcatcgatgacctcgccaaggaagtgaacctgagcgtctcgaccctgcaccaccgtttcaaggcgatcaccgccatgagcccgttgcaataccagaagcagttgcgcttgcaggaggcacggcgcttgatgattgccgaagggttggaagcgtcggcggcggggtatcgggtggggtatgaaagcccatcgcaattcagccgggaatacagccggttgtttggcgcgccgccgttgcgtgacctggcccggttgcgccagagcatttaatcgagggtgcgcggcagctgcaacgtcacccgcaacccaccctcacgcaaattctgcaaactcacttcaccgccatggctgtgcgcaatgttgcgcgcaatccccaggcccaagccgtaaccctgttgctgcccggccaggcggaagtgtggctcgaatacttgctccaaccgctgctccggcacgccaggcccctcgtcgtccacatgcaggacgaactccgcgccatcgtcctcgatgtgcagatgagcgttctgcccgtacttcaaggcattgtcgatcaggttgccaatgcaacgtttgagcgccagcggcttgcccggatacgccgccagggctgcaccgttcagcgtgacccggccgttgccgttgggtgccacgtaaggctccaccaggcattcgagcacatggttgaggtccaccggctcgatgttttcgtggatatccgtgtctttcacgcattgcagcgcgcccttcaccagcaactccagttcatccaggtcacggccgaacttggtttgcaggttctcgtcttccagcagttccacgcgcaggcgcaggcgggtgatcggtgtgcgcaagtcgtgggaaatcgcactgaacaactggctacgctcggtcaggtagcggctgatgcgctcacgcatggcattgaaggcacggcccacttccaccacttcgctgccaccgccttcggccactggttccacgtcggcccccagggacatatcccgcgccgcccgcgccaaacgcttgagcggccggctttgccagtgcaccagcaggccgatgaacaacagcaaaaagccgctggtcaacacgatgaaccacacctgctgggacggcaggccctgttcttcaaggctggtgtagggctcgggcaacagcgaggcgatatacaaccattcgcccggggcgagctggatctgggtgaccagcaccggcgggttcaccggttccagggtcagcgcgtagtgagcccaggaacgcggcagctcatcgagtttcaggccggcattgaagatgcgcaggtcttcggcgctgacgaactccaccgacatatgcacatcggcgccgagggtctgcttcagcacctcatccaccgcttcaagcaccgcctgtttacgcggggtctgcggcaggatggccatgtccagcgggcggtcattgagggtcaccacgaaacgcgtgccgcccatgctgcgcagttgatcgagcaccagtgggcggtaggccaccggcaacgagcggaaataactcacgctggcggtcatcgaatgcgccaggctgcgggcgctggtgaccaggccttcgagctgggtggcgcgcaattgcgagacccagatcacgctggacagcgcctgggcgaacagcaccgccagcagcgtcagcagcagcatgcgccccagcagcgaacgcggcaccgggaaacgccggcggtgttcggtcaaatgttcagtggacattgccggcaaccacgctggctgccagttgataaccactgccccgcacggtgcggatcagacgagggggcttttcggtgtcgcgcaggcgttggcgcaggcggctgacggccatgtcgacgatgcgatccaacggcatcaggtcgcgaccccgggtagcattgccgatggtgtcacggtcgagaatctgctgcgggtggtcgagaaacaatttgagcagggcgaaatcggccccggagaggatcacttcttcgccgtccacatggaacaggcggtggctgatcatatccagccgccactcatcgaataccagcacttcgccgccgttgctgcgctcctggccgaactggcaacggcgcaacaaggccttgatccgcgcttgcaactcgcgagggctgaagggtttgccgatgtagtcgtcggcgcccagctccaggccgatcacacggtcggcctcgtcggaactggcggtgagcatgatgatcggcacctgcgcctggcgcgggtgctggcggatccagcggcaaaggctgaaaccgtcttcgtccggcaacatcacatcgaggatgaccaggtcgcacggcgcctcgttcatcgcctggcggaaccccgcgccatccggcaccccacgcacctggaaaccggcgcgactgaggtaggtctgcagcaattcgcggatttcctggtcgtcgtcgaccaggaggatcgatttactgattacgctcacggggtcctccttgttgttatggggggttgttgatggcctcatcgggggcaagccccctcccacactggaatgcgttcccaatgtgggagggggcttgcccccgatagggccatcagcccctatgcaaaagcctgttccaacgcgacgccagccccggtcaacccggaatacggcgcggtcaccaaccacaccggaatacccttgaagtagtcgctcatgcagcctttgtcagcaaagctcctggcaaaaccgctgtggataaagaagtcggcaaacctcggtatcaccccgcccacgatgtacacaccaccgcgtccaccggtggtcagcacattgttaccggcgacgcggcccagccagatgctgaactggtccaacacctccatcgccaccgggtcaccggccaggccggcggccgtgatggcttcgggcgtttccagtaccggcgcatggccgtcgactgcacagatcgcccggtacagacgtggcaacccaccaccgctcaaagcggtttcagcgctgacatgcccgatctcggtgtagatgtgctgccacagttgggtttcccgtgggctgctcagcggcaggtcgacatgcccgccttcccccggcagcgccgcaaagcggccaccgcccaagtccagcaatgtaccgacacccaggccagtgcccggaccgatcaccaccgcaggccgcaacggctccggcgtgccttcgcagaccacgcggaattcgtcgggcttgaggcgggtcatgcccagggccatggccgagaagtcattgaccagcagcagttcgtccacctgcaacgccttgcaaaacgcagtcttgctcaggcgccagtgattgttggtgaatttaaattcatctccgctcaccgggccagcgacagaaagacacaccgcgccgatgtccccgatttccaggccttcctctttgaggtagaccttgatcgcctcttcaggactcttgtgatccgccgtggcatgcacacggatcgaatgcagttcctgatcccgccacaacgcaaaacgggcattggtgcccccgatgtcaccgaccagcgcaagcttcacttaagcgtctccaaggcacaggtaaaggcgctggcgccctgctctgcggagcttgcggccaagcgcataaatgcaaacagctcgcgaccggcccccacgttattgcccaacaggcccgtggcaggcgcgcgcgctgcaaattcttcggcgtccaccttaagctccagggtgcccttcacgccatccacgcgaatgatatcgccatcgcgcacccgcgccagtggtccgccgctctgggcttcggggttgacgtgaatcgcggcggggatcttacccgacgcgcccgacatacgcccgtctgttaccagcgcgaccttgaagccacggtcctgcaacacaccgaggaacggcgtcatcttgtgcaattcgggcatgccattggagcgcgggccctggaagcgcatcaccgcgacgaagtctttttccaactggccggccttgaacgcgtcggccaggtcctgctgatcctggaacaccacggcgggtgcttcgacaatctggtgttcaagggccacggccgagactttcatcacgccgcgccccaggttgccttccatcacgcgcaagccgccctcgggcgagaacgcacgggccacggggcgcaggatgctttcgtcgaggctctcgatcgggccgtcgcgccagatcagctcaccgtcgaccaggaacggttcctgggtgtagcggctcaggcccttgccggccacggtgttgacgtcttcgtggagcaggccggcttcgagcagttcacggatcaggaacgacatgccgcccgccgcctggaagtggttgatgtcggccttgccgttcggatacacgtgggaaagggtcggcaccacctcggaaaggtcggccatgtcgtcccaggtgaggatgatgcccgccgacatggcgatggccggcatgtgcagggtgtggttggtagagccgccggtggcgttgagcgcgatgatggagttgacgatggacttttcgtcgacgatctcgccgatcggcatgaagttgccgttggccttggtcaggcgcgtgacctggtgcgcggcttcgcgggtcagcgcgtcacgcagcggtgtgtacgggttgacgaacgaggcgcccggcaggtgcaggcccatcacttccatcaacaactggttggtgttggcggtgccgtagaaggtgcaggtgccggggctgtgataggacttcatctccgattccagcagctcttcgcgggtggccttgccttcagcgtagcgctggcgcacatcggctttctgcttgttggaaatgcccgacggcatcggcccgcccggtacgaagatcatcggcaggtgaccgtagcgcagcgcgcccatcatcaggccggggacgatcttgtcgcagatgcccagcatcaaggccgcgtcgaacatgttgtgggacagcgctaccgccgtggacatggcaatgacttcacggctgagcaggctcagctccatgccgggctcgccctgggtcacgccgtcgcacatcgcgggcgtgccgccggcgaactggccgaccgagccgacttcgcgcagggctttcttgatctgttcagggaaatgttcgtacggctggtgcgccgagagcatgtcgttatatgacgaaacaattgccacgttggcggcattcatcatgcgcaggctatttttatcttcagtgccgcaaccggccacgccgtgggcaaagttggcgcattgcagcttgccgcgcatcggaccgtcgctggctgcgccgcgaatgagcgcaaggtaagcctcgcgggtggcgcggctgcgggcgataagccgttcggtgacctcaagaacgcggggatgcatgtgtagaactccaggctaacggatgtggcgacctgagtgtctatgctgatcaaacgcccgcagcgcatgggatggcagggagtcgtttggatcatcggaccagttgattcaggtcactcgttgtagattgaacaaaatattgccactaaaaaggcttgttttctatttttatgcgaataatcttgtaattcttacaacaaatcgacgacaggcactttccaatgactcttcgtatcgcaatcaatggttttggccgtatcggccgtaatgtcctgcgcgcactgtatacccaaggctaccgccaggatttgcagatcgtcgccatcaatgatctgggcgacagttcgatcaatgcccacctgctcaaatacgacaccgtacatggcactttcgaagcagaggtcgcccacgatcaggaaagcctgaccgtcaatggtgaccggattgccgtcagtgccattcgcaacccggccgacctgccctgggctgcgcacaagatcgacgtggtgttcgaatgcaccggcctgttcaccgaccgtgacaaggctgccgcccatattaccgccggcgcacgcaaggtgatcatctcggcaccggccaagggcgcggacgccaccgtggtctacggcgtcaaccatgacattctgcgtcaatcccaccagatcatctctaacgcctcgtgcaccaccaactgcctggcgcctgtggctcaagtgctgcaccgcgagctgggtatcgaaagcggcctgatgaccaccatccacgcctacaccaatgaccagaacctgaccgacgtctaccacaccgacccgtaccgcgcgcgttcggccacccagaacatgatcccgagcaagaccggcgccgccgaagcggtaggcctggtgctgccggaactggcgggcaagctgaccggcatggcggtgcgggtgccagtgatcaacgtgtcgctggtggacctcaccgtacaactgaagaaagaagccacggcgcaagaagtcaacgcgctgctcaaagaagcaagccagcactcgaagatcctcggctacaacaccctgccgctggtttccagtgacttcaaccacaacccgctgtcgtcgatcttcgatgccaatcacaccaaagtcagcggtaaattgctgaaagtgctggcctggtacgacaacgaatggggtttctccaaccgtatgctggataactgcttggcgttgtgcaacgccgaataacgtggtttctgcgggaccttgtgaaggggcttgtgtgggagggggcttgccccctcccacattggtttgtgtcgcgcataaggaaaatagccacttgccatttgagttgatgataagcattatcattaactgcaaatcggtctggtagcactgtgagccaatctcgcttcaaccacgtctttctcacccaacgggtggttctgcttcgcaccttgcagcggatggtgaataaccacagcaccgccgaggacctgttgcaggaaacctacctgcgcgtcactcgggccctgagcgagcggccgatcgatcaccttgaacccttcgtctatcagaccgcgcgcaacctggcgctggatcatctgcgtgcgcgcaggatccaggcccgtacgctgcaggaagatgtcccgctggacgtcctgcaaagtgtcgccgcccccatcagcacgcccgaagatgccacccaggccgagcaaatgcttgaggccctgagcgtcagcctgggccagttgagcgcccgccagcagcagattttcatcctcagccgcctgcacggttgcagttaccaggagatcgccgatcagctggaagtgtccttgagcaccgtgcaaaaggaactgaagttgatcatggccatctgtgtaggtgtggccgaacgactggatcggccttaagcttcacccgacagaaacgtcgaccctagctgtaggaaagttgaatagaacgtggcgaagacccgaggaacaccgtgacggacccgaacaaactgcgcccccatgatgtggctcatgaggtgttgcaagacacggctatggaccaagccctcgactggctgatcgccttgcagtgcccgcagcccgggcagcaggccgaattcgaagcctggctggccagcgatcccgctcacgtccacgccttcgccaaggcccaggctgcctggggtggcgcgccagtgcacagcgccgccgtggccctggcagcaccgcgcaagcccagcgcctggcggcggatcaagccccattggaaaccgttggccaccgccgccgtgttgctgatcggcctgttcagcttcagcaacctgccggtgcgcctgcaagccgatcacctcaccgtggtgggtgaacgccagcgcctgcaactggacgatggttcaaaggtgttgctcaacaccaactcggcgttttccagcagcatcaaggaccaccagcgcatcgcccgcctgtaccagggcgaggcgtttttcgaaatcaagcccaaccatggcctgcccctggaaatcgacgccggccccgtacgtgccagcgtgcgcgatacagccttcgccgtgcgctacctcaatggcgaagcacaggtgcaagtgcagcgtggtgatgtcgacctgagcaataccttcgacgatgcccgcgtgcgcctgagcgccggtgaaagcatccgtatcggccccaagggtttcggtgcgcccgccaaactggacgccaacaaggacctggcctgggtgcaaggtcggctgatcttcgaaaactgcccgatgagcgaagtccttgccgaactgcgccgctattaccccggctggatcgtcaacaccaacgaccaactcgccagcgtcgccgtcaccggcaattaccgcctggaccagccgctggacgtggtgcgctccctggcccacatcacctcggccaagctgtcggaatacccggcactggtgatcctgaactaaatgagaattatttttactcgatagtcggcagtggtacgtctcgtcttagccaatgcaactgattcctatttgattcagttcgcaactataagattcgtaccccggagcgctctcgatgtcctcttgtttcaaccgccggtcctcttcgcccgtcctgtccttgctgacggtcgccatcctgctggccggtgcgccaatgatgaccgccaccgccgccgaacctgccccacgcagccacggcaactacaacttcagcatcgagcagcaatcgctggtctccgcgctcaacgcttttaccgccgtgaccggctggcaagtcggcctgccggcggaactggcccagggtgtgtcgtcccctggcgtacgtggcccgttgccgccggaaaaggccctggaccggctgttggtggggaccaacctgagctaccgcaagctgagcagcaacaacattgttctcgaaaagcgcacggcgggcagcaccctcaacctgcaacaggtgaccatcagcgccacccgcaacgagcaggatgtaaacagcgtaccgagcaccgtcagcgtgcaggatcgcgaagaactggaccgccagaacgtcaacaacatccgcgaactggtgcgctacgagcccggtgtctcggtcggcggcgcgggcacccgctccggtaacgccggcttcaacatccgcggtatcgacggcgaccgcatcctcacccaggtggacggcgtggaagtgccggacaacttcttcaacggcccctacgccaagacccgccgcaactacgtcgacccggaaatcgtcaagcgtgtcgagatcctgcgcggcccagcctccgccctgtatggcagcagcgccatcggtggtgccgtgagctacttcaccctcgacccggacgacatcatcaagcccggccaggatttcggcgctcgcctcaagaccggctacagctccgccgacgaaagctggctgacctccggcaccgtcgccggccgcgtacaggacttcgatggcctgctgcaccttagccagcgcaatggccacgagaccgaatcctacgacggcaacaacgccaccggcctggcccgcaccggcgccaaccccgaggacgcgcgcaccaccaacatcctggccaagctcggctggaactatggcgatgacaaccgcctgggcctgacctatgagaagtacaaagatgatcgcgacgtcaacctgaagaacgccgtaggcggcccgttcatcggcggccgaggctttaacctctaccgtgatcgtcgtggcaacgacaccattacccgtgaacgtttcggcctggaaaacagctttgccctcgagtcaccgattgccgaccgcatcaagaccagcctcaactaccagatcgccaagaccgaccagaccaccgccgagatctatcagtcaggccgtcgtgtcttgcgcacccgcgacacgctctaccaggaaaaacagtggatcttcgacgcccagttggacaaagcattcagcctcggtgaaaccgaccaccaagtgacctacggcaccaccctcaagcagcagaaagtcaccggttcgcgcgagggcaacgcgacctgcgtggccgtcggcagtggttgcaccgccatcggcgcgcccagcccgattgccagcgacagtgtgaagaagtccagcgacttccccgatccgaccatcaacacgtattcgctgttcgcacaggaccagatcacctgggacaagtggaccttcctgcccgccgtgcgctacgactacacccagctcaaacccaagctgacccaggagttcctcaacaccgtcaacccgacaggcgcggacccggtgagcgacaaggaaaaaacctggcaccgtgtgacgcccaagtttggcctgacttacgccctgaccgatcaatacacctggttcggccaatacgccgaaggtttccgtacgccgtccgccaaggccttgtacggccgctttgaaaacctgaacctgggctacaccgtcgagccgaaccccgacctcaagccagaaaccagcaaaggcgtcgaaaccgggattcgcggcaagttcgacgaaggctccttcgagatcgccgtgttttacaacaaataccgcgactttatcgacgaagacaatgccgttgccggcggcagccttgaacagttccaggccatcaacatcaagcgcgccaccatcaagggcgccgaagccaagggccgcctgaacctggatgccttcggcgcgccgcaaggcctctacacccagggctcggtgtcctatgcctacggccgcaacgacgataatggcgagccgttgaacagcgtcaacccgctcaagggcgtcttcggcctgggctatgaccaggacaactacggtggcctgttgagctggaccttggtgaaaaagcaggatcgcgtcgacagcacgaccttccacgcgccggacggcgacaccagcggccccttcaagacccctggcttcggtgtggtcgacctgacggccttctacaaagtcactcaggacgtgaccatcaacggcggcctctacaacctcaccgacaagaagtactggaactgggatgacgtgcgcagctacgacagcgtcggtgaagccgctgtgaccggcccggccaacctcgaccgcctgacccagcccggccgcaactttgcgatcaacgtgatctgggacatctagcaacgccctactcacctcgtcgaaatttcatcgacggggtgaggattttttactgtgccgcgtcttcttgttcgtctagttgataacagctctctttcgggcactaaggcgtatcccttctcaaggactttttcatgaccgcttcccctaccgcagaacgcgcaagcctgcgctcccaacgcctgaaccagatcaccaacgagccgcacaccaagctggacgcactggtcaaggcccacgccccgtttgaaacccaggccaacttcgcccgtttcgtggtggcgcagtacctgttccaatcggaactggtagccctgtacaacgatgccgaactgatcaagatcgtgccggacctggccgagcgttgccgtgccgaagccgccaaacttgacttgggcgacctcgacaccgacgtacctgcaccggttgccggcgcagtgaaaaacccgagcaaggccgaagccctcggctggctgttcgtgtccgaaggctccaagctgggcgctgcgttcctgatcaagcgtgccgtgggcctgggcctgagcgaaaccttcggtgcccgtcacctgggtgagccggcgggtggtcgtgccgagggctggaaaagcttcacccgcaccctcgacgccctggaattcagcgccgaagaagaagccgccgtggaaaaaggcgcaatcgacgcgtttgtgcgcttcaccgtgttgctcgaacaggcgtacgctagcgcccctgaattggcctgacatccagattgaaatgccatcaactgtgggagggggcaagccccctcccacagttggcgctcacttcgcgacgctacaaataaaccatgacccgcaaaaccccttccacctcgaaaatcgcccggatcctcttcggcctgctggcctatgtcagcctgggcattgggttgatcgcgattgtcgtgccgggtttgcccaccaccgaattcatcctgctggccgcctgggccgccaccaaaagctcgccacgcctcagcgcctggctggagaaccaccggctgttcgggccgatcctgttcaactggcgcaacggcaagatcatcgctcgccgggccaaggtcagcgccaccgtaagcatgctgctgtgcgccgtcctgatgctggtgatgctcgaccacggctggccaatctacctggccattgccggaatgagcctgggcaacctgtggatctggtctcgacccgaacgactcgcacagcccgtatgacgttggctgtaggcattttcctaccactcatcgcctgctgctcatgaataaatttgttacgccgatgtttcagacatagcgctgaatggacttggcctgcactgcgtgccttccaacaagtccattcgcgagtgagcctatgttcaacaccctctccatccgcttgaaaatcgtgctgttgtccggcctttgcctgctgggggtgatagcgctggtcgtcagcatcaatatctacaacaccagccagaatgatctgttggtcagcgattccagctcgcgcatgctcaccgccagcgtggaacaactgctgcaagccagggccgccgagcaagcgggccagttgcagaaaaccttcggcgacagcctgatggcgctgaccgcgctggccgaccagatcaaggatttgcgcagcatggccagcaagcgtggcctggaagccggcacgctgcgcgaagaaatcaaccagagcctgaaaaccaccttcgatcgcaacagcaaagtgctcggtttctggctgtcattcgaacccaacggcctcgacggcaaagacagcgaattcgtcgatgacaaggcgcgcgcctccaacgaaaaagggcgcttctccagctattggagccgtgccggcggtgagggcttgaacaccatcatggtcgaagaagacctgaacaagaccagcctcaccctcaacggtacgccctacaacatctggtacacctgcccacgggacacacgcaatacctgcctgctggacccgtatgaagacacggtggcgggcaaaaaggtattgatgaccaccatcgcctcgccgctgatcgtggagggcaaactcatcggcgtcgtcggtgtcgacatcgccctcaccgccctgcaagcaaccgccgatgccgcacagaaagacctgttcaacggcgccgcacacctggaaattctgtccagcaccggtctgatcgcggcctatagcggcgaacccgccaaagtcggcaagaacctggtcgacaccctcggcgccgagggcaaggaaatcgtgcaactgctggccagtgacaaccgcatgatccgcgaacaggacggcaccatgcgcgccgtgtacccggtcaaaccgattgccgacgccaaaacctggggcgtggtgatcaagctgccaaaagcggtaatgctcgccgataacgtcaagttgcagggagtacttgacaacgctcaggcagccggcaccctcaaggccctgctggtagccgccgccgctggcctgctgggtttgctgctgatctggctgaccgccaccggcgtgacccggccgatcaacagcgtggccgccatgctcaaggacatcgccagcggcgacggcgacctcacccaacgcctggcctacgccaagaaggatgaactcggcgaactggtgaactggttcaaccgcttcctcgacaagctgcaaccgaccatcgcccagatcaagcaaagcatcaccgaagcacgtggcaccgcagaccagtcttcagccatcgcacgccagaccagcgaaggcatgcaggtgcagttccgcgaaatcgaccaggtggccaccgcgtccaacgaaatgagcgccaccgcccacgacgtcgccaacagcgcgtcgaatgccgccagcgcggcacgcggtgccgaccagtcggcgcgggaaggcatgtcgatcatcgagcagagcacccgcgacatcaccaccctggccgaagaagtcagcaaggccgtgggcgaagtcgaagcgctggcggtcaacagcgagcagattggttcagtgctggaagtgatccgcagcattgccgagcagaccaacctgctggccctcaatgccgccatcgaagccgcacgcgccggggaaagcggccgagggtttgcggtggtggccgacgaagtgcgcaacctggccaagcgcacccaggattcggtggaggaaatccgtcaggtgatcgaacgcatccagagcggcacccgtggcgtggtggcgaccatgcattccagccagagccaggcccagaacaatgccgggcagatccatcaggcggtgcaggccttgggcaagatcagcgatgcggtcaccgtgatcagcgacatgaacctgcagatcgccagcgccgccgaacagcagagcgccgtggccgaagaggtcaaccgcaacgtctcggcgatccgtaccgtgaccgaaaccctcaccggccaggccaccgagtcggcggcgatcagcagccaactcaatgcactggccagccagcagatgaagttgatggatcagttcagggtgtaaacccaatctcaaaaacaacacagttccaatgtgggagggggcttgcccccgatagcagagtgccagtgaacgcctctgtagctgacacacccccatcgggggcaagcccctcccacagttggttcactttggatttagagaccggtccaggcactgacaaactgcgtcaggtcttctttagcagcagtacgcggcgggttctgcggcgtgcccaggtacaggaagccaatcacctcctcatccgccgtcagccccaggcctttggccacatgggccgaataggacaactcaccggtgcgccacaccgcaccaatcccctgggcataagccgccaacagaatgccatgagccgcacaggcagcagccagcagttgctcggacttcggcaccttgaagtgctcctgcaaacgagcaataaccaccaccaccaacggcgcgcgcaacgggccgttctgggccttgtcgatcaccgcttgcggcgcatcggcgtcttgcagccgggccgcttcggccaacaaagtgcccatctgctcgcgggcagtgccttcaaccgtgaggaaacgccaaggccgcagttggccgtggtcgggcgcacgcatggcggcggcgaacagcacgtcgcgctgctcctgggtcggtgccggttccagcagacgcggcacggaaacacggttgagcaaagcgtcgagagcctgcatgggccacctccagaaaaaaatgtgcggtcattctagcgggaatgaatcgggatgccaccaaacgataattgctcttattcattgcgccctgccctgttagactttgcgaccctattttcagcagtggttcaggaaactcgatgttccgttcgctttttcgcctgtccgcagcattgctggccttgagcctggctggctgcgatgacgcgcccaggtttaccaaggccgagccgggtgaatcacgggcgggcggcgctgcgacggtgaacaagcgcgaccagaacgcgttttccctgccctcggccaacctgtcgcccacgcggcgcctggacttcagcgtcggcaacagcttctttcgcagcccctgggtgatcgcaccgtccaccaccacggcgcgtgatggcctaggcccgctgttcaacaccaatgcttgccagaactgccatataaaagacggccgtggtcacccgccgctgcccgatgcgcccaacgcggtgtcgatgctggtacgcctgtcgattccggatacgcccgcccatgccaaggccatcgagcagattggcgtggtgcccgagccggtctacggcgggcaattgcaggacatggcggtgccgggcgtgccgccggaaggcaaggtgcgcgtcgactacacgccggtcaacgtcaccttcaaggacggcacggtggtcgagttgcgcaagcccgacctgcagatcacccagcttggctatggcccgatgcaccccgacacgcgcttttctgcgcgcatcgccccgccgatgattggcctgggcctgctggaagccatcagcgacgccgatatcctgcgcaacaccgacccgaagaccgccgccaagggcgccatcatcggtcgcgccaattgggtctgggacgacgcccagcaaaaaaccgtgctcgggcgttttggctggaaagccgggcagcccaacctcaatcaacaaaatgttcacgcgttctctggtgatatgggcctcaccacgtccctgagaccctttgatgactgcaccgatgcccaagtcgcctgcaaacaggcccccaacggtaatggccccgatggcgagccggaagtcagcgacaacatcctgcgcctggtgctgttctacacccgcaacctggccgtacccgcgcgccgtggcgtcaacacgccgcaggtgctggccggtaaaaacctgttctatcaagccggctgccagggttgccacacgccagcattcaccacggccgccaatgccgccgaacctgaactggccaaccaggtgatccgcccctacagcgacctgctgttgcacgacatgggagcgggccttgccgacaaccgcagcgaattcaaggccggtggccgcgactggcgcacgccgccgttgtggggcatcggcctgacgcaaaccgtgagtggccacacccagttcttgcatgacggccgcgcccgcaacctgctcgaagccgtgctatggcatggcggcgaagcccaagcggcgcagcagcatgtgttgtccttcaatgccgagcagcgcgctgcgttgctggcgttcctgaattctttataagcttcgccccacttacagaagggagctcgacatgttccgtcccaagttgttgttcaccagcctggccgccctagccctcggcgcctgctcgccgcaagacccgcaagcggtgacctcggcggccatcgccaagcaagtgatcctgccgacctacagccgttgggtcgaagccgaccgccaactggccgtcagcgcgctggcctactgccagggcaaggaaagcctggacaccgcgcgtgccgacttcctgcatgcacagaaggcctgggccgagttgcaaccgctgctgatcgggccgctggccgagggcaaccgttcgtggcaggtgcaattctggccggacaagaagaacctggtcggccgccaagtcgagcaactggtcgccagccaaccgcagatcgacggcgccgccctggccaagtccagcgtggtggtgcaaggcctgtccgcctacgaatacatcctctacgacgccaagaccgatatcgccgacgacgcgcaaaaggcccgttactgtccgctgctggtcgccatcggtgaccgccagaaggccctggccgaagagatcctggccagctggaacagcaccgacggcatgctggcgcagatgaccaagttccccaaccagcgctacgccgactcccacgaagccattgccgatctgctgcgcgtgcaggtgactgcactggacaccctgaagaaaaagctcggcacgccgatgggccgccagaccaagggcatcccgcagccgttccaggccgatgcatggcgcagccagtcgtccctgcaaagcctcgaagccagcctggcggcagcccagaccgtgtgggtcggcgtcgacaacaaaggcctgcgtggcctgctgccgtccgagcagaagccattggccgacaagatcgacgccgcctatgccgcgtcgttgaaactgttcgccagtaaccagcgcaccctcaatgaactgctggccgacgacgccgggcgccagcaactcaacgatatctacgacagcctcaacgtcgtccaccgcctgcatgaaggcgaactggccaaggcgctgggcatccaactgggctttaacgccaacgacggtgactgatgatgctcaggcgacaggctttggccgttggtagcgtgctgctcagtgcactcacactgggcggctggacgctgttcaaaagcaaagacaagggcccgctgctgctctcggcgcgggatgatgcagacggcaagcactacgccgtgggctatcgcctggacggcaagccggtgtttgccacccaggtcggccagcgctgccacgacatcatcaaccacccgacgctgccgattgcgctgtttgtcgcccgtcgcccgggcaccgagagttacctgatcgacctgcgcgatggcgcgctgttgcaaaccatcacctcccacgtcaaccgccacttctatggccacgcggtcatccacaagagtggcgactggctgtacgccaccgagaacgacacgtccgaccccggccgtggcctgctcggtgtgtaccggttcgaaggtgagcggctggtgcacagcggtgaaatctccacccacggcatcggcccgcaccaggtgtcgtggatgcccgacggcgaaaccctggtggtggctaacggtggcattcgcaccgaagccgaaagccgcgtggagatgaacctcaacgccatggaaccgagcctggtgctgatgcagcgcgacggcaccttgatcagcaaggaaaccctcggccagcagatgaacagcgtgcgtcacatggggatcgccagcgatggcaccatcctcaccgggcaacagttcatggggccgtcccaggagcgctccgagttgttggcgatcaagcgtccagggcagccgttcgtggcgtttccggtggccgacgagcagttgcaggcgatggggcactacaccgccagcgtggcggtacacagcgaattgcgcctggtggcgttgaccgcgccgcgtggcaatcgcttctttatctgggacatggacagcggcgagctgcgcctggatggccccctgcccgactgtgccggcgtgggcgcggtcgaggatgggtttgtcgtgacgtcgggccagggccgttgccggttctacgattgtcgccagaaacagctggttgcaaaaccgctggaattgccggcagggctctgggataaccatctgcatctgatctgagttcgcgtcgcttttcacccgacacgagccggatgccaacccaaaaaaaaggcctcgcaacgcgaggccttttcattttggttttaaactcatcaactctgtggcctcatcccttgagacattccaaacatgaacagcaataactcatgatcaggcttggccgccgtgctcgctttggcaacgcgcggcaataggcattgcgcgccaccctgcgttgcactgagcacctgtgtgcgaggctgttcccacgccgccagcgccaaggctgcgatgcccagcgctccgaccaaaaacagacctcgtgctatttctagcttcatctggttaaacccttgatagcgctgccaaacgccgtctcgtaaaagtagctgagtttcttccagtcggtatcgttccacgacgaatggcggcgcaattgcagcatgtcatgggaggcggcccgataagcggtcaggcgctggcgacatttctcgaaatccagcagcgccacttcgacgttggccgagtcaccctcgcccgtcacccgcacgaagatgtgcttgatgtagaggcagccatgttgccatcggcccttgtgcatgcgcgccagggtgccggccagttccttgagtacacgctcatgcaccagttcgccgtattgctcgcggccaccggcggcgtaccagttctcgatttcgtcgaaaccgtcgagagccgcagtgaccaacagcgctttccattggtgctcggggtcgcggcgcgcttcgcaaaacaccatttccggcacacgcacgtccaaaaggcgcaggcccttgatcgcatcgcgctcgcgcagcaccgtcgggcggccaaacggatgcagccaactgcggtagatgtgcccggtctggcgtttgctgtagagcaagcggccgttggggctgatcacacgctgcacaccgctttcaccaccacgccgacggttgggctcttcgacccactcgccctgctggcgccagaaataatcaaagcgttcttcgggcgctacatgactgcctgctacgcactcaactgccatcctgttacctcttgcgcaatacatacactcgccacatggcgtagagcggtatgaagtccagggattcctgaacacgaaaaccggcttcctcaaattctgcttcaacagtagcagccggtaacacaaacctgttttggtaaccttcctgctcaccttttacacgacgttgctgttcaagacgcttgcgtttccaggccttgaaattgccgtctacccataacgaaataatcacgctgtcacgggtaacgcgttgaaactcccgcaatatggccatgcgatgtgccgggtcaccaatgtggtgcaacaggcgcatacagaaaatgctgtcgaccgcgttatcttgcagatcaatatcaaaggcagatgtctgcaagggccgtacccgtttcaccacatcggcgggctgagcggccatcgccaccttcaacatggacgccgaattgtcggcaccgatgatcacgcggttgggtttttccgccagcaagggccagaaacgcccagcgccgcacggcaagtccagcactaggccaggctcacccgccatcgccagcgcaccacgggccaattgctcgtcgcgtttgtgggacaaccggcgcgccagattgtcctgatgcttgagcaaatattcctgagcgtgttcgtcgtcgtacttttcggaaaattcgagcttgatcggatcagacatcaacggatctccagtagctgatgcctacaaccttaagcagcgcactgtgatcaacaggtcaacccgttgtgaaaaacttgtcctgtccaatctcatacatttcaagactttacagacacaagcgatagcatggggccatcttcgccgaattaccgggatctctggcaggatagcggcagggggtggagtcaggcgttgacctgactcaattgcacatgaaagcggcagccgttgggctccatggtgctgaggctgacgctccacccctggttctcgcagatacgctgcaccagcgacagccccagccccaggccctcaccgcgcttctcgctgccgcgtacgaacggctcgaacatcgcctcgcgcttgtcctcggggataccgacaccgctgtcctccacgataaatccgctcggttccagggtgagtcggataaacccctgctcggtgtagtgcagggcattgcgcagcaggttgcccatcaccgcatgcaggaaggtggtgttatagcgtgtatccaggggattgccgggctggtagatcagctccaggcctttgtgctcgatgggctcacgccagatgccgagcagatcatccgccacctgcgtcaggctgacctggggcgacatcgccgcgtcgttgtgctgggcacgggccagcatcaggaaggtctgcaccagttcgcgcatttcttcgcaggcccgagcaatgcgcaatacctggttgcgcccgcgctgatcgatagcggggttttccagcagcaattcacaggagctggccagtaccatcaaaggcgtgcgcagttcatggctcacgtcactggtgaacagctgttcacgggacagcgcctggcgcagccgtcccagcgtggcgtcgaacgccaccgccagctcacccacttcatccgcagcgtaatccggcgccagaggcggggccaagccgagcagttggtcgcggtgacgcacctggcgggccaggcgcaccaccggcgccattaccttgcgcgccagcacccagccgaggaacaccgccagcgccaggctgagcacaaagcccaccagcaccacggcgaacaacacgcgctcgcgctcttcgaaatcgctttgatcctgcaacagcacgtagcgccgcccatcgaccacttcgaccatggcgtggtacgacagcgcctcgcggaatacttcatggaaaccgggctcaaggtgacgcaggtccttgggcaactcgaagtcgccggggccgccgctgaaataaaatagctggtctggctcgggccggtgccgccagtcctcgacggtgtccatcagcagcaggcgttgcaagtcgccgcccaggcccgccgagatcaacttctcttccaccaggtgcaccgtcgcgacaatgcccatggcgaaggcccccgccaccaacgcactcatcaaggcaaaggcgatgatgatccgttgcgcaaggctttgcttaaactccatcacgaccctcggccaggcgataacccacaccgtgcaccgtttgcagcaacggcttggcgaacggcttatcgatcacttggcgcaattggtgaacgtggctgcgcaggctgtcgctgtccgggcagtcatcgccccacagggcttcttcgagaatttctcggcgcagcacgtgcgggctcttctgcatcaacaccgccagcagcttcaggccgaccgggttgagcttgagcaggcgcccttcgcgggtgacttccagggtatcgaggtcgtagctcagatcacccacctgcagggcgcggcgaccgccgccctgggcacggcgcagcacggcttcgatgcgggcggccagttccgacagggcaaagggcttgagcaggtagtcatcggcgccggacttgaagccctgtagccgatcgtccagttggtcgcgggcggtgagcatgatcaccggcgtatcgcggcgggcatcttcacgcaggcgcttgcacagggtgtagccatcgatgccgggcagcatgatgtcgagcacgatcaggtcgtaatgctcggtggcggccaggtgcaggcccgacaaaccgtcctgcgcacagtccacggtgtagcccttgagccccaggtaatcggccaggttggccagaatatcgcggttgtcttcaaccaatagaattcgcatgggcagtgtctccgtacgcggtaacggccgtgttggctcgcgcagcttaaggccaagtgtggctcagggatagacccgcaagggccgtcgataaaggttttcaaccgatattttagttgaacgagattttcactatagcttcacaaactgactacagtgtcagggcgaagatcgcgcccatcgatataaggaagttggacatggggtttctcaaaacagcgcctatgcgctatttgctgttggtcaccggtgcctggctggttgtgttcctgctcacgcgcagcgtgttgctcattactcacctggatgaagtcggtggcaacctgctgccggtgtttggcgtgggcctgctgtacgacctcggctttctggcctacgcggccctgccactggggctgtatctgctgctatgcccacccgccctctggcgccgtcgcggtcaccgctggttcctgcaggcggtgctgaccgtcagcctgttcgccatgctgttcacctcggtcgccgagtggttgttctgggatgaattcggcgtgcgcttcaactttatcgccgtcgattacctggtgtactccgatgaggtgttgaacaacgttctggagtcctacccgatcggcaagttgcttagcctgctgacgatgctcgccgttgtgttgagcctggccctgcgcaaaccgttcaacgccgcgatgaatgcaccgctgccgacaatgcggggtcgcctggtcaatgccctgggccttttgatcgttgccggcctcagcctgcaactgatcagccaggacagcccgcgcgcccaaggcggcaacgcctacaaaaacgagctggcgagcaatggcccgtatcagtttttcgccgcgttccgtaacaatgaactggactacacccagttctataaaagcctgcccgcggatgtcgtcgccaaacagttgcgcgccgaactgagtgagcccaatgctcgcttcatcgacaaggaccccttggatatccgccgcgccatcgacaaccccggcacgccgcgcacacccaatatcgtgctggtgaccatcgaaagcttcagcgccaaatacatgggcagcaacggcgacgagcgcaacctcacgcccaacctggatgcgctgcgcaagcagagcctgtacttcaataacttctatgccaccggcacccgcacggatcggggcctggaggccatcaccctggcgatcccaccgacaccgggccgctcgatcgtcaaacgcatcggccgcgaaagtggcttcgccagcctgggccagcaactcaccgccatcggctatgacagcgtgttcgtctatggcgggcgcggttacttcgacaatatgaatgcgttcttcagcggcaacggctatcgggtcgtcgaccagagcagcgtgcccgaatcggagatctcattcaaaaacgcctggggcatggccgacgaagacctctacaaacaaaccctgaagctggccgatgccgactacgccaagcagcagccgttcctgctgcaactgatgaccacctccaaccatcgcccctacacctacccggatgggcgcatcgatatcaaatccggcaacggccgcgacggcgcggtgaagtacaccgaccacgccatcggcgaattcctggaggcggcacgccagaagccgtggttcgacaacacgatcttcgtgttcgtcgccgaccacactgccggcagcgcgggcaaggaagacttgcccatcagcaactaccagattccgctgttcatctatgcgcccaaactggtcgacgcccgggaaaccgcgcaactggccagccagatcgacctggcgcccaccttgctcggcctgctcaacctgagctacgaatcgaccttcttcggtcgcaacctgctgcaagacaacccactgccaccgcgtgtggtggtcggcaactaccagcacctggggctgtttgacggcaaagacctggcgatcctcagcccacgccagggcctgcgtcgccacgatcaggccctgggtgaaagccaggagctacgggtgggcagtgatgacccgctgatcctgcgcgccatcgcctactaccaagctgccagctatggcttcaaacagcagttgctgggctggaaagcgccgaaggtcgcagaacccgccgtcagcgcccgctgatcgccacgcgtggcccttgcctcctgcggggcaagggcgtaacacttgcgcccattctccggcgacgacgccctttcatgtccgacaccctgctgctgatcgaagatgaccgcccactggccgcgctgacggcggagttcctgcgcgccgagggattcaacgtggcggtggagcaccgtggcgaccgtgccgcccagcgcattcttgacgaacaaccggcgttgttgatcctggatgtgatgctgcccggcatcgacggttttaccctgtgccgacagatccgcgagcagtaccccggcctgatcctgatgatgacggcgctggacgaaaacgccgagcaattgacggggttcaacgttggtgcggacgattacgtggtcaagccggtcgacccgctgttgttgctggcgcgtatccgctcgctgctgcgtcgccatccccaggcgccccgtgcgtcttaccaatggggcacattccgcttggacctcaacggccatttcgcctggctcgacgaggtgcccttgcagttctcggtggccgagttcgagttgcttgcgatcttcgcccgccactgcggtgtgttgctgacccgggaaaaactcctgcaaagcctgcgcggcctggagtacgacgggctcaatcgctcggtggatatgcgcgtgtcacgtctgcgcaaaaagctgatgagcctggggtgcccggtgacgatccagaccatcacggcccagggctacctgtttgtcgaaacaccgcaagaggcccggcatgttctctagagtgcgaccctggatggcgattctcgcgggcactggctggggcgcattcaccctgtatttgctgtggctgtgcgccaatgcctcggtatttgtcggcgaatacagctttttgcgcttgatggccgggccgggctatctggtggcggagcaactcaaggccctgccggccgaccagcgtgaagcccgtatggaggtactgcgcgcgcgcttccagtacccgatccgcctcgtcaccctgggcgaggtcgaactgccgcccgaagccctgatcatgctgcaacaccagcaaccggcacagagcagcgatgaagacatcacctatttcccattcgatgacaaaacgctgatccaattcggtccgatgtggggaaccgccgaggtcaaggacctgctgcaattcccggtgtatgggatcaccgcgtgcgtggccgccctgccgctgttgctgtggatgtggttcggcctgcgtgcacgccgccaacgaaatgctgatctgctggtccttgatgcctgcctgggcaccctggcccgcacgcccaacgcgatgctgccggccatgggcaaggaatgggcgcccgtgctgcagaccttgcagcaacatgcccaagacatcaccgccatgagcgaacgccaccgggaggtttcccaggccgtctcccatgagttgcgcacaccgttggcccgcatgcgcttcgctttgaccctgctgagcaaaagcgacgatcccgccacccgcacgcgcttgcaggaacgcctgcaaaccgatgtggaagagcttgaagccctggtgcgcgccagcctggcctttgcccgcatggccggcgcgcccaccgacctgcagcatgagcccatccctatccgtgactggttgcatcaggagtttgccttgctcgacgggcatcagcggcgcctgagcctggacaccgagccggcggacctgcaactgatcggcgaccgcgccttgttgcacttgatcgtgcgcaacctgttgagcaacgccatcacctacgcccgcgaccaagtgagcgtcagtgctgcccagcaggatgaccaacacctggtgctgcatgtggacgacgacggccccggcatactcgccgaaaaccgcgaaaagattttcgaaccgtttgtgcgactggccatgggcggcgatgagcccggcggcttcggcctcgggctggcactggccaggcgcgccacccaatggcatcgcggtgagctgtctgtggcgcgcagcccgttgggcggggcacgcctgaccctgatcctgccactgcgcccccagtaaccttcgtgttacagcctgtgacagtgaaccgctggcattctccgtaatctcgccacctgatccagggttgcccctgcgccctgggtccccgtcctttggacccggttggagagcccgttcatgcgtcccccaaaacagcatttacccacgttgatgctatcgctgtgtatcgtcgccagcgcgctgctgaccagccaagcggctgccgtgagccgcgcagcgcctgacttcactggttcgatcaagtcgcccggctacgactcccacacccttaaactgctgggcgaggtgaccatgtccagccgctggcggcggcccatacccaggccacgcactaaagccgcgactctgtctgcccaagggccgctcggccacacgtctgcaccgtggtcctctgcacgtgtgccctcggcgcttgccagagggatgaccttcaagaggctgttgcgacgcggcggcatgggctgaacgctcaaccaagcataaaaaaaccccgcctgcatcactgcaggcggggttttttatgagccgggtaaggctggcttacatcatgccgcccatgccacccatgccgcccatgtctggcataccgccgccagctgcgccttcagccttaggcttgtcggcaattgcagcttcggtggtcaggatcagaccgccgatggaagctgcagcttgcagcgcggaacgagtcaccttggttgggtccaggatgcccatttcgatcatgtcgccgtagacgccagtcgcagcgttgtaaccgtagttacctttgccgttcttgacttcattgaccacaacgcttggctcgtcgccggagttggcagcgatctggcgcagtggcgcttcaacagcgcgacgcagcacagcgataccgacgttctggtcagcgttgtcgccggtcaagttggtcagggcttccagagcacggatcagcgcaacgccaccgccaggtaccacgccttcttcaacggctgcacgggttgcgtgcagggcgtcttcaacgcgggctttcttctctttcatttcaacttcggaaccggcgccaaccttgatcactgcaacgccgccagacagcttggccagacgctcttgcagtttttcacggtcgtagtccgaggaagtttcggcaacctgggcacggatctgagtgatgcgcgcctggatgtcctgctcaacgccagcaccgtcaacgatgatggtggcttccttggagatggtcacgcgcttggcgctacccaggttttccagggtggcgctttccaggctcaggccgatttcttcggagataacggtaccgccggtcagaacggcgatgtcctgcagcatggccttgcgacggtcgccgaagcctggcgccttgacggctgcgactttaacgatgccacgcatgttgttcacaaccaacgtcgccagggcttcgccttcaacgtcttcggaaacgatcagcagtgggcggccggctttggcaacggcttccagcacgggcagcatttcgcggatgttggagattttcttgtcgaccagcaggatcagcgggctgtccagctcggcaaccatggtttccggcttgttgacgaagtacggagacaggtagccacggtcgaactgcatgccttctacaaccgacagttcgttttccaggccagtgccttcttcaacggtgatcacgccttctttaccgactttttccatggcttcggcaatgatgtcgccgatggagctgtcggagttggcggagatggtgcctacctgagcgatagccttggtgtcggcgcatggcttggacaggtttttcagctcagcaacgatggcgatggtcgccttgtcgatgccgcgcttgaggtccatcgggttcatgccggcagcaacggccttgtagccttcgttgacgatcgcctgggccaggacggtagcggtggtggtgccgtcgcctgcgtcatcgttggcacgggaggcaacgtctttgaccagctgcgcgcccatgttttcgaaacggtcttccagttcgatttctttggcgacggaaacgccgtccttggtgatggtcggagcgccgaagctcttctcgatgatcacgttacggcctttcgggcccagggtcgcttttactgcgtcagccaggatgttgacaccggtgagcattttcttgcgggcggaatcgccaaatttaacttctttagcagccatgatcgataatccttaaatactttggagtaacgggaaaatgagcggggaaattacgcttccagtacggcgagaatctcgttctcagccatgaccagcaggtcttcgccgtcgattttcacagtgttgctgccggagtaagggccgaatacaaccttgtcaccgactttaacggccagagcacgcacttcaccgttttccagggtcttgcctgggccagcagcgacgatcacaccgtggttggctttttcagcagccgaacctggcagaacgatcccgccggcggttttcttttcttcttcgctgcgacggattacgacgcggtcgtgcagaggacgaagcttgctcattgtcgatctctcctaattgtgtttttcatcggccggtgtctgtaccggcgggttgtattccggctgtgccggtcgcgcctcgccaagcaagacgcggaagtctgtctggtgtcgccaccagaaaccttgcggtgaccgttacataagggcgcataagcttattacaaggggccgcggcggaaattttttgcaggcgccgacggttgaaagcaacacggcacccgaaggtgccgtgccaatgaagcggttatttgctgtcgcggtgttcgaactcgccttcgatcacatccccttcacgccccagcggctggcgtggagccggtccgccacggggttgcaggtcgtcggcaaaggctcgctggcgaatcgccgcctcttcggcgcgctggcgcatcttgccggccagcagcttgcgggtgaacggcagcaacatcaccagacccaccacatcgctgatgaagcccggcaggatcaacaggccaccggccagggccatcatcaggccttcaagcatggtctgtgcgggcagctcgccacggttcaggctttcacgggcacgcagcgccgtggccaggccggcgacgcgcagcaccagcacgccgagcatcgagccgagaatgatcagcaacagggccgggaaaaacccgatcgcgctgctgacttgaacgaatacgaacagctccaacaccgggaacagcagaaagagcaataaaaaagggcgcatcaaatggttcctcaacgcaagaatgccttgccagtccaccttagatgacgtcgccgtttcgtgaattcaagcgtcagcagtggcttttttcggccaggcctcggcatgggccaatgaaaccagggcttcgcgtacttgtgtcggcgtgttgcaaggctccgcaaacggcaaccaatataaggaatggccgatacgcaagtgcatgccttcgctgtcgatgccggctaattgagcgggctcggaagtcggcaaaccgccgagatcgacgtaatgggcaatggccttggtgtgatcgctgttcatgtgttcgatcatgctgcgctcggccttgccggcgaacggattggccaggttcaactggtcgatccagtgaatcgccccaaagccaccgatgtaacggtggcgtacgggcttgagtacccagaagtcgaagtcgtgggccttgtggtagttggcggagtccgggaagtagcggtagtaacgctcggccgccgcctcgatggccgcgccctcctccagcttttccgcttcggccaggtaggtcaggcgcccgacggcctgcacgtcatcggcctcacgctcaccgaccagcaacgaacacttggggtctttctgcaggttatgggtgtgctgtgcgatgcggctgatcaggatcaacgggcgaccctgctcgtcgaggcaatacggtacgaccgagccgaaagggaagccaggcatggctttggataaagtggagagagccccacggtattccttgagcaacagctctcgggcgttcttggcaacctgtgcgctcaacgtatgactcctcgggtattcagccgcccatggcatatgggaatggatctcaacgcaaggtaatcatatccgcaaaggttgccaagcaggttttgtgcgcccgtgttaccaggccacaccgaaaccagcggtgtagcgggtcttgctcaggctgctctcggagtcgccgctgatgatgtcgcgctcggccttgaggttgagggaggcccattcggtgactttgtagcgcaggcccatttccgcatccagggagtaatccacgggcccatcaatcggccggcccagttcaccattggtgaagaactcaaccgtcttgcccaccaggtagcggttgtagttccacttcatggccaccgagtagaagttgtctttgccaccctcggcatattcatagtcagtgcggttgaccagcgaaccgagggagaacgcgcccagttcatcatcccagaactggtagccggggccggtgccgacggtgcgctggcgggacaggtcttcgaccttgtcgcgcttgtaggtcaagcgtccctgccagaaccaatgctcggtgaggaaacggtccaggtcgtattccagggcccagttgtcggtggtggtgacatcgtcctggaactcacggttgtattcgccctggccggtgtggcgccactggccatgccgcgccgtggtcttgaagtcgatgtcgtagtcgttggtgtctttttcggcgcgcttgtagtccagcgccaggtcgacattgcccttccacaccaggtcttcgatcaccggcttgggcttgatgatctgctggatgcttgccaagtccaccgtcttgggcgcctcgccgttggccagcaccaccttgccatcatccgctgccttcagagacttggccttctcgccggtgtaggcgtcctgtttgaccaataattcctggtcgctctccagggttttcacctgcttccagtccacggggatggcaccggcgtagtcggtctggatcagcaatttgccgccatcgaagactttgatcttgccggtcaggcggtcaccgttcttcaaccagacggtgtcggccagcaagggcgtggaggcgctgaaaacagcaaggcacagcagggttctggacaacataagcgggtatggggctcaaggttggcgaaaaggaggcattatcgtgttagatagctaggactgactcaagtatcggggtcgagttcaatgctcatcgccatgtttacagacgtttcttacaaaaatgccgacgatttcaacggatagccgcgcaatgaatcaaccagccgagtcgccgcaaagccctgccgagatgcgccgtactgcgctgtacctgaccctggcacaagtgccaccaggctgcgtggtgagttacggcgagctggctcacctggcgggcctcggccgtgctgcgcgctgggtgggtcgtacgttgagccaactgcctgaagacaccaggctgccgtggcaccgtgtgctgggtgccggtggtcggataagtctgccggtgggcagtgcttcaggcgacgaacaacgggcgcgtttgcgcgacgaaggcgtcacggtccgcaacaatcgcgtggatattcagcgccatggctggcgcccggtagagcacagcggttagagtgcgcgctttgtttccgcaaatctgaggcagactccagcccatgccccgtaaaacctggcgcgccgcgctcgctgcctatgccagcccttcgacgttagtcctgttgttgctcggctttgccgccggtctgccttacatgttggtgttctcgacgctttcggtgtggttgcgcgaagccggtgtggcgcgcgagaccatcggctatgcgagcctgatcggtttggcgtatgcctttaaatgggtctggtcgccgctgctcgaccaatggcgcctgccactgctcggtaaactcggacgccgccgttcctggctggtgctggcccagtcgctggtgatcctcggattgatcggcatgggtttctgcgacccacagaaacacttgtcctggctgatcgctatcgccgtcatcgtcgccttcgcctccgccacccaggacatcgcggtggacgcctaccgcctggaaatcgccgacgacagccgccaggccgcgctggccgccagctacatgtccggttatcgcatcgccgccctgctggctacggcaggcgcactgttttttgccgaagggttcggctccaccggtttcaactacaagcactcggcctggaccggcacctacgtgctgttcggcgtactgatgattccggcgctgctgaccacgctgttcatgcgcgaacctgatgtgccactgcgcacccagttgcaggccgggcgctacagcttcgtacaccaactggcatcggtgtttgtgctgatcgtgctgctggtatcggtaccggcgatgtttacccagttgttcaacacggacttcggcagcgtgatattccacggcgtgagcctgtgggacctgctgatggaagaccgcgccttcctgcgcgccatcctctatataaccctcacgtcgctgtgcctgtcggccatgggtcgccggggtctagcgccggtgctgacaccggtcaacgacttcatcctgcgttaccgctggcaggcattgctgttgttggggctgatcgccacctaccgcatgtccgacaccgtgatgggcgtgatggccaacgtgttctacatcgaccagggcttcaccaaggaccagatcgccggcgtcagcaagatcttcggcctgatcatgaccctgctgggtgcaggtatgggcggcctgctgattgtgcgcttcggtatcctgccgatcctgttcatcggcggcgtggcgtcggctggcaccaacctgctgttcgtgatgctcgccgacatgggcccggacctgcagatgctgatcttcaccatttccctggataacttcagctcagggctggcgacctcagcgttcgtggcgtacctgtcgagcctgaccaacctcaagttctccgccacccaatatgccctgctcagctcgatcatgctgttgctgccgcgccttatcggcgggtattcgggggtgatggtggagaagttcgggtatcacaatttcttcctgatcacctgcctgctgggcgtgccgacgctgttcctgatcgcgttgcactggttccaggaaaatcggcgggcgcggttgagtccaccgaccgaagactgacaatgagggaggggcttgcccccgatagcaggttgtcaggcgcttatgtgttactgatccaccgctatcgggggcaagccccctcccacatacccctctgcgttctgatgcctgtactccagcagccggcgcccgtacaatcccaagtcatttcaagtccaagcaaccgacaacggcctaccatgcgtaccagtcaatatttgctcgccacacagaaagaaacgccttccgacgcggtcgtgatcagccaccagctgatgctgcgcgccggcatgatccgcaaactggcctccggcctctacacctggctgcccatgggcttgaaggtgatgcgcaaggtcgaagccatcgttcgtgaagaaatgaacgccgccggctctctggaagtgttgatgccgagcacccaaccggctgaactgtggcaggaatccgggcgctgggaagagtacgggcctgagttgctgcgcttcaaggatcgccatggccgcgatttctgcgccggcccgacccacgaagaagtgatcaccgacctgatgcgcaacgagctgagcagctacaagcagctgccgctgaacctgtatcagatccagaccaagttccgtgacgaaatccgcccacgcttcggcttgatgcgcggccgcgaattcatcatgaaggatgcctattcgttccacgctgaccaagcgtccttgcaggtcacctacgaccgtatgcaccaggcctactgcaacgtgttcacgcgcctgggcttgaagttccgcccggttgaagccgacaacggctccatcggcggcgccggctcccacgaattccacgtgctggccgagtccggcgaagacgacatcgtgttcagcaacggttccgactacgcggcgaacatcgagaaagccgaagccgtgccacgggaaacttcccgtccagccccggccgaagagctgcgtctggtggacacgccggataccaagaccatcgcggccctggtggaaaaattcaatctgccgattgaaaagaccatcaagaccctgatcgtgcgtgccgaggaagaaggcaagctgattgccctggtgatccgtggcgatcacgagctcaacgaaatcaaggcggcccagcaacctggcgtggccagcccgctggtcatggccaccgacgccgaactgcgcgacgccattggcgccggtgccggttcgctcggcccgctgaacctgccgctgccgatcatcatcgaccgttcggtcgagctgatgagcgacttcggtatcggcgcgaacatcgacgacaagcactacttcggcgtgaactgggaacgtgacctgccggtgccgaccgttgccgacctgcgtaacgtggtagctggcgacccaagcccggacggcaagggcaccctggaaatcaagcgcggcatcgaagtcgggcacatcttccagctgggcaacaagtacagcaaggcgatgaagtgcgaagtgctgggcgagaacggcaagccgatcaccctggacatgggctgctacggcattggcgtatcccgcgtggttgccgctgccatcgagcagaacaacgatgacaaaggcatcatctggagtgacgccctggcgccgttccaggtcgccctggtgccgctgcgttatgaaaccgagcaagtacgcgaagccaccgacaagctgtatgccgaattgacggctgctggttttgaagtgctgctggatgaccgggacaagaaaaccagcccgggcatcaagttcgccgacatggaactgattggcatcccgcaccggatcgtggtcagtgaccgcggcctggcggatggcaatctggaatacaagagccggaccgaagccgaagcccaaccgttgccggtggctgacgtgctgtctttccttcaggcgcgtattcgtcgctgaaaaccagatcaagagaagtcatgttcaagcgaaacaccagagccctggggggcgccgccttgtgcggcgccctgctggtcagcggctgcgccaaccagatgtcgcaacgcagtgagcacgaagagcgagtcgagcgtaagttgctcgaccacagcctgcagatcgatgtaggcgagcccaaagtgctggagctgccgcaacgccgggttcgcattcacgagcagaagaccttcgaggtcaccgagttcgaagtcacccgtcgttacgaccgctataccccctaccagccctggcgcaagctctacgagatgccattgggtgcggttgccctggtggcgggcgcgggtgccaacgtggcgaatatcttcgccctcggccacctgccgaccagcatgacccatgactggctgacctatggcgtggacggcctcaacccgttcatgaacgtgcaatcccacggccgtgcacaacagaacctggcgggtatcgatgaagtccagcgcgacaagcgcgtggagtattcgagcctgccctggagcgagcgcccggtgcaggtcaccgccggcaagcagacccatgagctgaccaccgaccgcaacggcgtcctgcgcctgaacctgttggacagcccatttgccgagcaggacctaaaccgcgtcaccaccttgaagatcagcgtggaagatggccaggacgatgtgcattcggactcgaccctggcgatcagcaacaccctgcgcggcaagttgctcgaagcccacggtttgatctacgacgatctggaagacgatgaagtcagccagtgggtgcaccgggtcaagcgcttgtcggagctgggcctggaagaagaggccagtgagctggagcaaagcctgatcgaactgacgcgcaatgatcccgagttgcagcaagagtttctgcaggcgctgaccaaggatgcggggcggctagtcgcagatcccggcgcacgctgagcccctcaaattgttgccggtcaaatgtgtgagggggcaagccccctcccacatttgctcccgatttttaccaggaaaattcgagctgctcgttgccattgctcaggtccaacaaccgcacaccaatccccaacaagcgcaccggcttgcctccgcggttgaacgcctgcgtcagcagctgttgataactctctagatcccgccctgccccagcctgttccagtgtggtctgggtaaagtcatgaaacttcaccttcacgaacggcttgcccgccctgtaactgctatcgatgcgcgccatgcgcccggccagggtttccatcagttcgggaagtttggccaggcagcttgagaggtccggcaggtccacgtcataggtattttccacactgatcgattgtcggcgactgtcgttctgcaccacacggtcatcgatcccacgcgccaggctccacagccgctcgccaaaactgccgaattcgcgcaccagcgccagcttgttccactcgcgcagttgcaggcagtcttcgatgcccaggcgtgccagtttatcggccgtgaccttgcccacaccgtgcaacttgctgacccgcaactgtgagacaaagtcttcgacctggtccggggtaatcacaaacaggccgttgggtttcttccagtcgctggcgatcttggccaggaacttgttcggcgccacgcctgcggacacggtgatgtgcagttggttggagacacggcgacgaatgtcctgggcgatgcgcgtggcgctgccgccaaagtgcgggctgtcggacacatccaggtaagcctcgtccaacgatagcggttcgatcaggtcggtgtagtcgcgaaagatcgtctggatttccttcgaggcttccttgtaggcgtccatgcgtggcttgacgatggtcaggtccgggcacagcttcaaggcatgccgcgacgacatggccgagcgcacgccataggcgcgcgcctcgtagttgcaggtggcaatcacgccgcgccggtccgccgagccgcccaccgccagcggtttttgcgccaggctcgggtcatcgcgcatctcgatggcggcgtagaagcaatcacagtcgacgtggatgattttgcgctgcgtcatataaacggggtgtgtacctacgggtggccagtatcgcattcacacctgtatatagcaccagtagtttgaatcttccgctcaagcggtaggaaaattccaggatgaatttattttctcaatcggatttggccttccgatagagctgaaagcctcggccagactgggcccgcggggtatcaaggggcctttatggagagctaagcgattgaaccacaagcgcttttctttaattcacaggttgacagaccggcgttcctctgtagaatgccgacacacagacgcgggatggagcagtctggtagctcgtcgggctcataacccgaaggtcgtcggttcaaatccggctcccgcaaccaaacatcaaaaaaggctactcgaaagagtggccttttttgtgcgtgcctgttttgtcctgtacgaaaattgtaagacaaaaaaatctttgcccttcgcgcacttacggtgcatggccgacattcaacggctaattcacacttatttgacccatcggctcattaacggttgacacctcggcgctgaactgtagaatgccgcccacagacgcgggatggagcagtctggtagctcgtcgggctcataacccgaaggtcgtcggttcaaatccggctcccgcaaccaaacctcaaaaaaggctactcgaaagagtggccttttttgtatctggtgaaaaagttcttctgaaacaatggcatggcatctttcatgaaaccgcacacggtttgtagagtccatctcattgcaagctatgctcaatgctcaagcgctgccctctacgaccaatggccgcagtcgccgcccccggcgatacgcgttaatatttgtaattattttgtccatagggattggtaacttggctggatacctccatcctgtcgcgcacaatccacgaggtgattgatgcgcgccaactcgtctgaaccacaagacaccgtcacagcagaacaaccgatcacacccacccgcttgcgctggctggatctggtgagcaagtaccggcaacctatcgggctggccgtcaccttattgctgtttgccattgccctgatcgcctgccgccacctgctgctggagctggacctctacgccctccacgactcgatcctggaagtgcccaagccggccctgctcggtgcgtttgccgcagccattgccggttttgtcattctattaggctatgaattctccggcgcccgctatgccggcgtaaacctgcccgccaagaccctggcccttggcggctttaccgcattcgccatcggcaatgccattggcctgtcgatgctttccggcggatcggtacgctaccgtttatatgcacgccatggcatcggtgcatccgaagtcgcccatatgaccgtgttcgccagcctggcgctgggcactgccctaccgccactggctgcattggcaacactgagcaacctgcccgccgcatcgacctacctgcatttaccgcaagcggtgctgggcggtattgccggcgcggtgctgctgttgtcggcggtgttgtgcatcggcatttatcgccgtcgcctgccggagcaaccctacccggacaacctgttggtcaaagccggccgccgcaccttgcgcctgccgggccgtcgcctgaccttcctgcaactgatcattaccgcactggacgttgccgccgccgctaccgtcctttatatgctgttgcccgaggctccgcccttcggccccttcctgctcgtgtacctgctggcgctggccgccggtgtactcagccatgtaccgggcggtgtgggtgtattcgaagcgatcctgctggcagccttcgccgacaaactgggcgccgcgccactggccgccgccctgctgctgtaccgcatgatctacgtggtgctgcctctgctgatcgcctgcgtgttcctgctggtcaacgaagcgcagcgcctgttccagacccagcaaagcctgcgggtcgcctcggggctggcggcgccagtactggccgtcctggtttttctgtccggcgtggtcctgctgttctctggcgccacgcccgaaatcgactcgcgcctggaaaacatcggcttcctgattccccaccgcctgattgacgcctcgcactttggcgccagcctgatcggcgtgttgtgcctgctgctggcccaaggcctgcgtcgacgcctgtcggccgcctggatgctgaccatggtgctcttgctggcgggcgccctgctctcgctgctcaaaggcttcgactgggaagaagccagcctgatgaccatgaccgcgatcctgctggcgatcttccgacgctcgttctatcgcgccagccgccttaccgagctgccgttctcgccgctgtacctggtggccagtgtctgcgtgctcggggcgtcgatctggctgttgctgttcgcctatcaggacgtaccgtacagccatcagctgtggtggcagttcaccctggacgccaacgccccccgtggcctgcgctcgctgctcggcgccgccgtgttgctggtgatcgtgtccctgacctggctgctgcgtaccgcgcgcccggtgatccatttgccgacacccgatgaactggagcgcgccagcaaaatcctgatggcctcttcacagcccgacggcggcctggcgctcaccggcgacaaggcgctgctgttccaccccaacgacgaagccttcctgatgtacgcccgtcgcggtcgcagcctggtggccttgtacgacccaatcgggccaacccaaccccgcgccgagatgatctggcagttccgtgacctgtgcgacatccaccacgcccgcccggtgttctaccaggtgcgtgcggagaacctgccgtactacatggacatcggcctcaccgcgatcaagctgggcgaagaagcccgcgtcgacctgaaacgctttgacctggaagccaagggcaaagagatgaaggacctgcgctacacctggaaccgtggctcgcgggacggcctgtccctggagatctgcgaaccgggcaccgcgccgatggacgagctcaaggtgatctccgatgcctggctgaccggcaagaacgtgcgggaaaagggcttttccctgggacgcttcagcgacgactacctcaagcacttccgcatagcgatcattcgcttcgaagggcgcccggtggccttcgccaacctgctcgagacctacaaccatgacctggccagtctcgacctgatgcgcgcccacccggacgcgcccaagctgaccatggaattcatgatggtcggcctgattcaacattataagagtcacggctacgcccgcttcagcctcggcatggtgccgttgtcgggcctgcaaccacgacgcggcgcaccgctgacccaacgcctgggctcgatggtgttccgccgtggcgagcaactgtataacttccaaggtttgcgccgcttcaaagacaagttccagcctgactgggaaccccgttacatggccgtgcccgcaggacttgatccgctggtggcactggccgataccgccgccctgatcgcgggcggcttgactggattggtgaaacgctgatgattcgacgctcctggcggtatgtattggcctttgtagtgctgctcgccctgttcctgggtggcggctattggtactggaaccgccctgccccacaaccggtgctggagcaactgccccaggccgacggttcggtcatgacccgcgtgacccccaacggcacgccaaaagcccgcgtggccgtggccgtgatggccgatgaaaccctgaccgacagtcaactgattgccttgagccaaggcggcaaggcgcagattgtccaggtgatcctgcccaaggatgactgcaaactgcaggaacaagcgctgcaaagcgccctgggccagctcaagggcccggcgacgctggttagtggcatcggccccggtgcaagcctggcctggcgctggctggcggcacagaccgacgacaaggccaacgccatctccgtcggcttcgccatgacccagccaggctgcaccgacccgctgccgaaaacctccgcccacggcaactggctggtggcctggaacgacaaccctgaggatgacgccgccagtttcgtccgtgacacaccgcgtgccaccaccagcatcagtgactacgacattcattacccgcaagtgctgaacaacgagttgcgcaagcaactggtgggctcggacaacggcggcctggcgattccggtggttgaagtaccggccggccaggccaaggacactgtcaccctgttcctgtccggcgacggcggctggcgcgacctcgaccgtgatgtggctggcgagatggccaagatcggctacccggtggtgggcatcgacacgctgcgctactactggcagcacaaaaccccggaacaaagcgccaaggaccttaccgagctgatgcagcactaccgtcagaaatggggcaccaagcgcttcgtactgaccggctattcgttcggtgccgatgtattgccagccatctacaatcgcctgccggagaacgagcagcagcgtgtggacgcaatcatcctgctggcgtttgcgcgtacgggcagcttcgagattgaagtggaaggttggctgggcaatgccggcaaagaagccgccacgggcccggaaatggccaagctgccggctgacaaagtggtgtgcatctacggcgccgaagaagtcgacgagagtggctgcacggacaagacggccgtaggtgaagccgtcaagctgccaggtgggcatcacttcgatgagaactacccggcgctggccaagcggttggtggatatcatcgtgaaacaccagaccaaggataaagccgagtaactccagctattacatggcttaaaatgtgggagggggcttgcccccgatggcggtgggtcagctacagataagctgactgaagtgccgctatcgggggcaagccccctcccacatttatatttgcaatgttgtttagattcagcgcggttcgatatgcgcgatcatcaattgcacggtttcattcccgcgaaactcgttcacatccagcttgtaggccagctccacccagcgcaccgtcgggttcggccagatctcccggtccaccccaaacgcaatgccatcgagcttcaccgagccgcattcgctcttgagcacgaccttcaagtgccgctcgcccaccacgcgctgctccaccaactgaaacacgccgtggaacaacggctccggaaagtgctgcccccatggcccggcatgtcgcaacgcgcgggccagttccaagtgaaactcttccaccgccagtgtgccgtctgacagcagacgaccggtcaggtcttcttcgcgcagttgccgacgcacttcggcatcgaaggcttcggcaaacagcggaaagttttcctcgggtaatgtcagcccggccgccatcgcgtgaccgccgtatttgctgatcaggttcggatgctggctggcgaccaccgccagggcatcacggatatgaaaaccctgcacagagcgcccagagcccttgagcaaaccgtcgccagcgtcggcgaaggcaatggtcgggcggaagtagcgctctttcatgcgcgacgccagaatcccgatcacaccttggtgccattccgggtcgaacaggcacaaaccgtagggcatcgactccaccggcaagtccttgagctgggccagggcctcgcgctgcatgccttgctcgatggatttgcggtcctggttcatgccgtccagttgcgcggccatttcacgggcagcggccacgtcggtggtgagcaggcattcgatgcccaggctcatgtcatccaggcgtccggcggcgttcaggcgcggcccgaggataaagcccaggtcggtggaggtgatacgtgcggcgtcgcgcttggccacttctaggatcgccttgatccccggccgtgcacgaccggcgcggatacgttccagcccctgatgcaccaggatgcggttgttggcgtccaggggcactacgtcagcgacgctgcccagggcgaccaggtcgagcaactcgccgatgtttggctgtggcttgttctcgtaccagcccaaactgcgcaggcgcgcacgcaaggccatcagcacgtagaagatcacgcccacgccagccagcgccttgctcgggaattcacagcccggctggttcgggttgacgatggcatccgccgccggcaactcgtcgccgggcaagtggtggtcggtcaccagcacctgcaaccccgccgctttcgccgctgccacgccttcgacgctggagatgccattgtccacggtaatgagcaactgcggctcgcgctgcaaggcaacggcgacgatttccggggtcaggccgtagccgtattcgaaacggttgggcaccaggtaatcgacatgggccgcgccgagcaagcgcaggcccaaggtgcccacggtgctggcggtggcgccatcggcgtcgaagtcaccgacgatgaggatgcgttggcgttgctccaatgctgtcaccagcaggtcgaccgccgcgtcgatgcccttgagctgctggtagggaatcaaccgcgccaggcttttatccagttcggcctcggacagtaccccgcgcgcggcgtaaagacgggtcaacagcggcggcaattcaccaagaaacggcaggacggcgggcaacgggcggggatcgatacgcatggggtgacggatacttctcttctgatacggaaataaaacaggtgaccggcggcgatccaatcaaccgcgttcgccaaccagccactgcaactgcacttcatgctggccgcggtcgtcggtgacgaagatcgtgccttcgctgatcatcacatcccacttgataacacgcggcatgtccttggccagggtctcaaggacttcctgcggcacggcggcgatgtgtacgtttttcaggttgttcgccaccggcaccaccttgccttcccacacacgcaggctgccgtaggccagcaggctggtgcgttcagtgcggcgcgagcaccaggtgaggcggtccgcatcgggctggccgacttcgatccagtgcaacacccggtcatccaggcttttttcccacaaggctggctcgtctacatctgataggccacgtccgaacgacaactgctcgttgtaccagagggcgtaggccagcagacgcacggtcatgcgctcttcggtttccgacgggtggcgggcgatggtctgtttgacgctctcgtacaccgagcgatcgaggtcggtgaggttgagttcgaatttgtaggtcgtggacggctgggccatgaacgggcttctagagacagggaaaggcggccagtctaaccgatgacgaggccaatcaacgaatccagcgctgccctgggctgctcgcctatgttaaaaggcatcacaccaccgccctgcgcagacaaggatcctcatgtcgttcaatgccaaaccacttgccggcctgaaagtcatcgaactcggcaccctgatcgccggcccgttcgcctcgcgtatctgcgcggagttcggcgccgaggtgatcaaggtcgaatcaccggacggcggcgacccgctgcgaaaatggcgcaagttgtacgagggcacttcgctgtggtggttcgtgcaggcgcgcaacaagcagtcgctgacgctgaacctcaagcacccggacggcctggccatcctcaaacaattgttggcggacgccgacatcttgatcgagaacttccgccccggcgtgctggaaaagctcggcctgagttgggagaccctgcacgcgctgaaccccaagttggtgatggtgcgtctctccggctttggccagaccgggccgatgaaagaccagccagggttcggtgcggtgggtgaatccatgggcggcctgcgctatatcaccggtttcgaagatcgcccgccggtgcgtaccggcatttccatcggcgactcgattgccgcgttgtgggcggtgatcggcgcactgatggcgctgcgtcatcgcgaggtcaacggtggcctgggccaggtggtggatgtggctctgtacgaagccatcttcgccatgatggaaagcatgatcccggagttcgacgtgtttggctttattcgcgagcgcaccggcaacatcatgcccggcatcacgccctcctccatccacaccagcgccgacggcaagcatgtgcagatcggcgccaatggcgatgcgatcttcaagcgcttcatgtcggccattggtcgtgaggacttggccatcgatccggtactggccagcaatgacgggcgcgacagccgccgtgatgaactgtacggcgtgattgatcgctgggtgaactcactgtcgctggatcaggtggtagaaattctgaataaagccgaagtgcccgccagccgcatctacagcgccgaggacatgctcggcgacccgcaattcctcgccagggaaatgttcctcaaggcccagcttcccgacggcaaggaattcaagatgccgggcatcgtgcccaagctgtcggacacgccgggcagttgcgaatgggtggggccgcaactgggtgaacataacagcgtagtgctcggcgggctgggttacgacgctactgccattgtgcgtctgcgcgaggaaggcgcgatctgatggcccgtcgggttactcagttgtgcctcgccgtcatgatggcgagcgcctggcctctgccggccaatgccgaggacacgctgatctggcttttgcgtgatttaccgccactgaccattttcgaaggcccgcgcaaaggccagggtgcgctggaccaactgctgccgaaactgatcgagcatctgccggaataccggcaccaggtactgcacgtcaatcgcgcacggggtacacaaatgcagcgcgagcccacattcacctgcgacccttcattgctgtggaccgccgagcgggccaggtacgtggtgttttccaggcaggcctttgtggtcgccagcaatgggatcacgatccggcgcagccagcagcaagccatggccgactatatttcggaaggccagtttgacctacaggccttgctcgacgcgcataaggcacgggtgggggccactgcggagcgcagctacggtcctgtcatcgatgcacagctcaagcaggccgacacgcactcactcgcgctgcattacggtaacgatgcactgggcagcctgttacaaatgcagcgcctggggcgcttggaggccgtgctgggttactggccggagatccgctaccacgcgatgcagcaaggcatcgcctcggatgacctgagcttctatccgatcaaaggctcggcgccgtatcagcgtacgcacatcggctgctcggatacgccccaggggcgccaggccatcaaacgaatcgaccagatactgcgcgagatcccgctggaacaagtgcagcagtcgtatacctcatggctggacccggtcatgcgcacccattacctgcgggataacccgagttttttccaggactcgccagagccgtgacaaatcgcaggcaaaaagaaaccccaaagcgtggggagacactttggggttaaacgtggcctacaaagaccagtacagcaaggcacaaacaccggagcacaatgtttgctcttgctgttacaaaatctgaccggccacgctgtaggaagtttccacagttaaacaattcttcatgcggcggtggcgttgcgagtctgggctgcgttgcgcaaggctgctatgaccgagggttccagacgtccttcggcaattttgatgtcacgcagcaggcaatccactacatccaccagcacgcgcttgtccatcaattgggcgcggtcgacgtcacgctcgaccacgatggcgccagcaggattcttaacggttaccaggcactcgtcctgcacaccagaggtggtcagcgtaacctgataagggctcagtgcttcttcgagcaataggctgatactttccatctcgatcaccactcaatagttcgggaacaatcgtttcaacgggagctgcatctatcctaagtgactgtttgtgacgtaggaaagttcgctttatcgtctttatggggccgtcagggggtgacggattccagcatgcgcttgcaacatgacaacgaaaaaacggccgcacataagtgcttacgcaatgggcggcttttttgggggttccgggcgttgaggcccaaggtgaatcctatactcggtgggcgctgatcactttgccttgcaggcaggagcgcatgtcaaaaggcccttattgcgaaggataaatacgatgctggaacacgataaagagcaagctgcgctagagaagattcacgccgacatatcacgcatttatgcggagcaacgcaaactcactgccgagacacacaagataacccgtgagaatttctggtatccattgggtgtcgtcatggccatgtttacggcgttcagcactgtcttggctatcgtacagaaactactcacgtagccgcgtataccaagcggggcctgccagaaacgaaaaacgccgctgccccaggaagggaaagcggcgtttttgtctacgcggtgtgccttacaacggcttaccccggttgccatgctggctcacaaacgcctgtacggccttcaggtcattggccaacaccgtgcaacgctcttcacgctcgaacaggtcagccaggtgcaccggcaactccagcgccttgccaacaccggccttctccaccgcttccgggaatttcaccggatgggcggtgcccaggatgaccatcgggatatccaggctgcgacggcagtcgcgggcggccttcacgccgatggcggtgtgcgggtcgagcagctcgccggtctgggcatagacttcagcgatggtttcgcaggtctgcgcgtcgtccacggccagggagtcgaacagcttgcgggtttcggtccagcgctcttcatccacgctgaaaccgccgccgctcttgaaggtgtccatcaagccggcaatcgccgcaccgttgcgaccgtgcatgtcgaacagcaggcgttcgaagttcgacgagaccatgatgtccatggacggcgacagggtcgcgtgcagggtctccttgacgtactggttgccgctcatgaagcggtgcaggatgtcgttgcggttggtggcgacgatcaattggttgatcggcaggcccatgttgcgcgccaggtaaccggcgaagatatcgccgaagttaccggtcggcaccgagaacgacaccgaacgcgccgggccgcccaactgcagcgaggcatgaaagtagtagacgatctgggccatgatccgcgcccagttgatcgaattcaccgccaccaggcgtgtgcccttcaggaagctctggtcagcgaagctgttcttgaccatttcctggcagtcatcgaaattgccttcgatggcgatgttatggatgttctcgccgaagatggtagtcatctggcggcgctgcacttccgacacacgcttgtgcgggtgcaggatgaagatgtcgacgttttcgcagtgcttgcaaccttcgatggccgccgaaccggtatcaccggaggtggcaccgatgatcaccacgcgctcgccgcgcttctgcagcacgtagtccagcagacgccccagcaactgcagggcgaagtccttgaaggccagggtcgggccgtggaacagctccagcacccactcgttaccattcagttggcgcagcggtgcgatggcgttgtgggaaaacacaccgtaggtttcttccagaatctttttaaagtccgcatccggaatgctgccggtgacgaacgggcgcatcacccggaaggccagttcgtggtacggcaggccggcccaggaagcgatctcttcctgggtgaagcgtggcaggttttccggcacgtacaggccgccgtccgtggcaaggcctgccagcaggacgtcttcgaaattcagggccggtgcctggccgcgggtactgatataacgcatgactggctcctctagagcattcttgaacaagggccgccgaacttgcggggctcttgccgcaaaaccattagttcaggtgttcgacgcgaatccgtaccaccgggccgaccacgccttgcagggcttccagggcagcgatggcatcgttgatgtgctgctcgagcacgcggtgggtcagcaggatcatcggcacctggccgttttgctcctcgacttccttctgcatgatcgactcgatgttgataccgcgctccgacaggatgctcgccacttgggccaacacgcccgggtggtcctgggcctggatgcgcaagtaataggcgctttcgcaggcttcgatcggcaggatcgggtgagccgacagcgagtccggctggaacgccaagtgcggcacacggttttccgggtcactggtcatcgcacgcaccacgtccaccaggtcggcgatcaccgacgaagcggttggctccatgccggcacccgcgccgtagaacaacgtggaaccggcggcgtcaccgttgaccatcaccgcgttcatcacgccattgacgttggcgatcaggcggtcggccgggatcagcgtcgggtgcactcgcagttcgataccggccggcgtgctgcgcgccacgcccagatgcttgatgcggtagcccagggcttcggcgtagttcacatcggccgtggtcagcttggtgatgccttctgtgtaggctttgtcgaactgcagcgggataccaaaggcgatggacgccaggatggtcagcttgtgcgcggcgtcgataccttccacgtcgaaggtcgggtcggcttcggcgtaacccagggcctgggcctcggcgagaacgtcttcgaaggtgcggcccttctcgcgcatttcggtgaggatgaagttgccggtaccgttgatgatgccggccacccagttgatgcggttggcggacaggccttcacggatcgccttgatcacagggatgccaccggccactgcggcttcgaatgccacgatcacgcccttctcacgcgccttggcgaagatctcgttgccgtgcacggcgatcagcgccttgttggcagtgaccacgtgcttgccgttctcgatggccttgagcaccagttcgcgggcaacggtgtagccacccaccagttcgatcacgatatcgatttcagggttggtggccacggcgaagacatcgttggtaatcgcaataccggtcgtttcgaactgaggctttggcgaacgcgtggcaatttgcgccacttcaatcccacgccctgcacggcgggaaatttcttcagcgttacgctgaagtacgttgaaggtgccgccaccgacggtccctaacccacagatgcctactttgaccggtttcactgaagaactccccatgaaacggccgacgcgaggtcggccgtggaaaacagccgcacgactgcggctttcaattaacggcctgtcgacttatccacaggccatgatcgtcaaaggttcgacgatgctggtttatttggcactcagcgccagtttcgcaacttgtggtgccggctggtagcccggaatcacctggccgtcagccaaaacgatggccggtgtaccgttgacgccgatggactggcccaacgcgaactgcttggagaccgggttggcgcatttggcggccttgatttccttgccgtcgaccatcttgtccatggccgcttttttgtcggccgagcaccatacggcttgcagctgctcgtcacccggcgaacccaggccctggcgcgggaacgccacgtagcgcacttccacacccagtttgttcagcgcaggcacttcggcgtgcagcttgtggcagtacgggcaggtggtgtcggtaaacacggtgatgtgggtcttggtctcgccgatggctgggtaaaccacggtttcagccaccggaataccattgatcagcttggaaacacccaggcgttcggctttctcggtcaggttgaccggcttgccgtccttcaactggaacaggtagccctggacgatgtactggccatcggcactggcatacagcacgcggctacccttgagcttgacttcgtacaggccggccatcgggctggcgctgatgctctcgatcggggtgtcgagctgcaggttggccaggcttttgcggatggtctgctcggcggcgtcatcggcaaaggcaaaggtggaaaccaacgcaatggctgcggcggcaataatctgggtcaagcgcatgggaactcctgaaggcagatgcagggacgggcagtaacactgcttggaaacacaggtctgggtcgtcccctttgctaaccggcaaagcctaccacagttgggccgcagggcagcccgtggccggataaattggacgttttcagcctcgcgggtggtgcttggcgtgcatatcctgcaaacgcgcgcgggccacgtgggtgtagatctgggtggtggacaaatcgctgtggccgagcagcatctgcaccacacgcaaatccgcaccgtggttgagcaaatgcgtggcgaatgcatggcgcagtgtgtggggcgacagcgccttgccgatcccggcgaccttggcctggtgcttgatgcggtgccagaaggtctggcgagtcatctgctcgccacgcaaactggggaacagcacatcactgggccgtccaccgagcagttcgctgcgggcatcgcgcatatagcgctcgacccacacaatcgcttcctcgcccatcggcaccagccgctccttgctgcctttgcccatcacccgcaacacgccctggcgcagattgacttgctccaaggtcagactgatcagctcggtcacccgcaggccacaggcgtagagcacttcgagcatggcgcggtcgcgctgaccgatggcctcactgaggtcgggggcggcgagcaaggcctccacgtcggcttccgacagggatttgggcaacggtctgccaagttgtggcatatcgacttgcagggtggggtcgagggcgatcagcttttcccgcagcagatagcgataaaaaccacgcacgccggagaggaatctcgcggtggaacgtggtttgtagttctgttccaggcgccaggccaggtggtcgaggatcagctcacggcccgcgttgatcagtgcgaggtttttctcctgcaaccagccgttgaacagcgccagatcgctgcggtaagcctggcgcgtgttgtccgacaggcctttttccagccagagggcgtcgagaaaacggtcgatcagggggtggtcaatggcaggcatagaggctcgaataaaaaagtgggagaggcaggtagcatcctatctcggacctcaaatcgcaggcacaaaaaagcagcccgtaggctgcttttttctgcatcgggaagctggacttaagccagtttttccttgatgcgagctgctttaccggacaggtcacgcaggtagtacagcttggctttacgtacgtcaccgcgacgcttgacggccatgctgtcgatttgcgggctgtaggtctggaaagtacgctctacgccaacaccgttggagattttacgaacagtgaaagcactgttcacaccacggttacgcttggcgattaccacgccttcgaacgcttgcagacgcgaacggtcgccttccttcactttcacctgaacgacaatggtgtcgcccggggcaaaggtagggatctctttggtcatctgctctgcttcgagtgcaaggatgattttgttagtcatgctgtgctcctaaggtaagtcaatggacctaccatcgatacgttgttaactatcgtcccgcgcgaggatgtattcctcgagcagcttcttctcttctccagaaagcgagcggctttccagaagatcggcgcgtcgttcataggtccgaccaagggactgctgtaaacgccaacgccggatgtgtgcgtgattgccacttagcaatacgtcgggaacacgctgatccgcatacacctccggtcgggtgtagtgcgggcaatccagcaaaccatccgtgaaggaatcttcctccgcggagtccgcatgccctaaagctccaggcagcagtcgtgtaaccgcatctatcaggaccatcgctggcagctcgccgccagacaggacatagtccccaatcgaccactcttcatcgacatgagcttcaataaaacgctcgtcaatgccttcatagcgaccggcaatcaggatcagtgcttcctcattcgccagttcgcggaccccagcctgtttcagctgacggccttgaggggacaggtaaatcaccttcgccttctccccggcagcgaccttggcctgaaccaacgcgtcttccaggggcttgatcttcatcaccatgcccgggccaccgccaaatgggcgatcgtccacagtgtgatgtcgatccgtcgtgtagtctcgcggattccaacaggtaagctgcaacagcccctgtttcaccgcccgactggtgatgccgtactcgctgatggcggaaaacatctcgggaaacaaactgatcacttcaatgcgcaaattagccacgcttagaagtccgcgtcccattccaccttcatctcgcccgctgccaggtcgacggccaacacgcattgctcggtatagggcaacaggcgttcgcgatcatccaggctgccagcgcaaggcttgaccaccattacatcattggcgccggtttccagaagatgatcgattttcccgaacagttgcccgagttgatcaataaccttcagaccttccagctggtaccagtagtactcgccgtcggtcaattcagggaacaggttgcgcggcacgcagatctcataaccggccagaagacgagcttcttcacgatcatcaagacccttgagctttgcgaccaggaacttgtcgctcccgcgtccactgaccagctcgacctgtttcacactaccctcgcgcttgagcgtccaggttttgtactgcaacaggttttcagtcggatcagtaaaggaatacaccttcacttcgccgcgaacgccatgaaccgagtaaatcttgccgataacgatcaaatcatcagcaacagctggcgtcgcgttcatattgctcaggctgcggccttagccgagtccttcaacagttttgcaacgcgctcggatggctgtgcacccacgctcagccagtaggctacgcgctcttggttcacggacagacgaacttcttgaccacgagcaacagggttgaagaaaccaacctgttccttgtgcgaaccgtcgcgcgggttgcggctgtcggttacggtcaagtggtaaaacgggcgctttttggagccgccaagggcaagacggattgttagcatgtgaacatcgttcctgtagtcggtgctgcaaatctaaatgcacagcgggcataggtgcccgaaaggccgcatattctaaggaatatccggacttttgcaaatgtctttttctggcgcctatcagcgtgccattcagatctgctatagagccgtcggttaaaacggcgagtcagcgcccgccaacggcgggtttgctggagatcccacatccctgtgggtcggagcaggagctgggctcccgctcgaattctttacatcttgggcatgccaccgccgggcaacataccgcccatgccgcgcatcatcttggccataccgcccttggcggagaatttcttcatcatcttctgcatctgcttgtgttgcttgatcaagcgaccgatgtcctgcacctgggtgccggaacccatggcgatccgacgcttgcgcgaaccgctgatcagctcagggtcgcggcgctcggccggggtcatggagttgatgatggcttccatctgcttgaactgcttctctgccgcgccctgggcattgcccatctgcgccaggttcacaccgccgatgttcggcagcttgtccatcaggccgccgaggccgcccatgttcttcatctgttgcagctggtcgcggaagtcttcgaggtcgaagcccttgcccttcttcagctttttagcaagcttgtcggccttgtctttgtcgagggtagcttcggcctgctcgatcaggctgagcacgtcgcccatgccgaggatgcgcgaggcgatacgctcgggatggaacggttcgagcgcttcgctcttctcgcccataccgatgaacttgatcggcttgccggtgatggcacgtaccgacagcgcggcaccgccacgggcatcgccgtcgaccttggtcaggatcacgccggtcagcggcagtgcgtcgccgaaggccttggcggtgttggccgcgtcctggccggtcatggcgtcgaccacgaacagcgtctcgaccgggttgatcgcggcatgcagcgccttgatctcgcccatcatctcttcgtcgatgtgcaggcgaccggcggtatcgacgatgaccacgtcgatgaacttgagcttggcttctttaatggcagcgttggcgatgtcgactggcttctggctcaggtcggacgggaagaaggtcacgcccacttcgcccgcgagcatttccagctgcttgatagcggccggacggtacacgtcggccgacaccaccatcacggacttcttcttgcgctctttaaggaagcgcgccagcttgccggcggtggtggtcttacccgcaccttgcagacccgccatcaagacgacagccggcggcaccgcactgaggttcaagtcttcgttggccgcgcccatcaggctttcgagttcggcctggacaatcttcacgaacgcctggcccggggtcaggctgcgggacacttcggtgcccaccgcgcgctctttgaccgagttgacgaagtccttcaccaccggcaaggccacgtcggcttccagcaacgccatgcgcacttcacgcagggtgtctttaatattgtcctcggtcagcttggccttgccggtaacgtggcgcagcgtctgcgagagacggtcagtcagattttcaaacatgcgcgatcctttcaggccctattcatagaccgaggtaatggcggcccaggctgtggtaaatcgctattaaaaacagcgctcggcgagcctgcggcgtgggcaggtcgcggattatagcgaagactgcgcccatgcacacccgctgtctggcccgggagtctttcgtgttgcgcgggggtatgccaaactcagcgcctttcgggcttgcctaacaggatttatgctccctttgtcacccagtttgctacccagcctcgccgccgccatcttgtacgccgctgcgaccgtctatcagggcactcgtctggcccagggcaccaaggcggacaaacgcctgttggtaggccttggtgtcctcgccttgctcgcccatgcggccagcctgttcacgcacttgatgacgccggtcggcctggccctggactttttcagcgccgccagcctgatcgcggcggccgtcatcgcgctgaccctgatggcctgttaccggatcccggtcgaaaacctgctggtgctgctcttcccgctgggcatgctgacggtgctgctggcgcaattcgcgcctaccggtacggtgccggtgatcgatgaagagccgggcatcctcgcgcacatcctgctgtcgatcctggcctatggcatgttcaccatcgcggtgttccaggccctgctcctgctgctgcaggaccaccagctcaagcacaagcatccgtccgggctgatcaagaacttcccgccactgcaaaccatggaaagcctgctgttcggtttcctgtgggccggctggaccttgctctcgctgtcgctgatctccggctggctgttcttcgaaaacctgttcgcccagcacctggtgcacaagaccctgctggcctgcctggcctggatcgtgttcagcgtcctgctgtggggccgcaaccgcctcggctggcgcgggcacaaggcgatccgctggaccctggccgggttctgcctgctgatgctggcctatttcggcagcaagctggttcgcgaatacatcctgcatatctgacgggcggcgatcatggacaacttgcccctggagccgatgctcgcggtaatcgccctgctggtgttgtgggccgcgctgttcaccgccatcgaggccgcccagcaacatttgctggccctgcgccccggtacacgccagggcgacaaggcggccacccgcctgagctttccgcgtaacagcctgatcctgtgcaacagcctgtgtcgcgccgccgtggtcatcctgtgcacgctgctggccatatacgcctgggcgcagaacgggccgtggctcggctggctgatctcctgcgcgatcctgctgatactggccgactacctgccccgcgccctggccacccgctatccgcaagcggtactgggcttcggcaatacgctgctgggcgtgccactgaaaatcgtctaccccctggcctggctgctcaatggtattagtctgttgctgcttcgcccgttcgcgcgcaagaccggcgtggtgaagaagagcgacgaaccgctgcctgaccatgatgacgaacccgagcccgagatcgccgaaggccgtacccccggcatgccgggcatccatgctctggacaacatcaccgtcaacgacatcctggtgccccgcagcgaagtggacggcatcaacctggatgactcgatcgaggagatcatcgagcagctacgcacctcccagcgcacgcgcctgccggtgttccacagtgatatcaaccaggtcgaagccgtgctcaacacgcggcagatccagcacctgttgcccgacgcgagcctgaccaaagaggcgttgctcgcagcctgccacgagccttacttcgtcccggaaagcactccgctgcaactgcaactgctgaatttccacaaacagcagcgccgcctgggcatggtggtggatgaatacggcgaagtactcggcatcgtgaccctggaagatatcctcgaagaaatcgtcggtgaattcgaaagcgaacagagtgcggacaacccgcatatcgaagcgcaaccggatggccgctacatcatcgacggcgccgcctcgatccgcgaattgaacaagagcctgaactggcacctgcccagcgacggccccaagacgctcaacggcctggtcaccgaagcgctggagaccattccggattgcgcggtgtgcctgaaaataggccgctaccgcctggaaatcctcgagaccgaggacaaccgggtgagcaaggtgctgatctggcataccagccggatgccggtcgccgcttaattcgtaatcaaataatgtgggagggggcttgcccccgatggccgagtgtcagtcaccgcatcaagtggctatacacagctatcgggggcaagccccctcccacattttgacttgttgtatgttcaaaccccttcctataatcgggacggcttaccagagccctgcccgaccgcgtgctacccgcactgaacgcgtccaggcaccgttaaaccgcgtctgaccggtgttcgctcccatcccgagccgccccgcgcgctaccctgatccatgggagttcgaccaataataatccgcgtccaaacgcgcaatgaccgtcagggataccaccatgagcaccacctacaacgaggccgcgcccgccgctgccccgaccaactcgaccgcacgtgtcgccacggcgagcatcgtcggcaccgccatcgagttctacgatttctatatctacgccacggccgctgcgctggtgatcggcccggtgttcttcccgcagacttccggcaccgcgcagatgctggcgtcgttcctgaccttcggtatcgccttcatcgcccgcccactggggtcggcgctgttcggtcactttggcgaccgtatcgggcgcaaatcgaccctggtggcctcgctgctgctgatgggcgtgtgcaccacgctgatcggtttgttgcccggttatgacagcatcggggcgtgggcgccgatcctgttgtgcgtactgcgtttcggccagggcctgggcctgggcggtgaatggggcggcgcagcgctgctggcgaccgagaacgcgcccaagggcaaacgcgcctggttcggcatgttcccgcagctcggcccttcgatcgggttcctggcagccaacggcttgttcctgatcctggccatgagcctcagcgatgagcaattccgcagctggggctggcgcattccgttcatcctcagcgcggcgctggtgatggtgggcctgtacgcacgattgaagctgcacgagacgccggtgttcgccaacgccgtcgccaagcaagcgccggtcaaagtgccgttggtggaactgttcagccagcattggctgccggtgttgctgggcgctgcgtcaatggtggtgtgctatgcgttgttttacatcactactgcgttttccctgagttatggcgtttcaaccctgggctacagccgcgaaaccttcctcggcctgctgtgctttgcggtgctgttcatggggctggcgacgccattggcagcgttggccagtgatcgttacggacgcaaaccggtgctgatcgtcggcgcgatcctggcgattctgtcgggctttaccatggagccattgctcacccacggttcgacctgggcggtggcgctgttcctggcgctggagctgttcctgatgggcgtaacgttcgccccgatgggcgcgctgttgccggaactgttcccgacacgcgtgcgttataccggcgcttcggcggcgtataacctggggggaattgtgggggcatccgccgcaccgttcttcgcgaccaaactggtggcgatgggtgggctgagttatgtcggtgggtatgtgtcggcggcggcgttgctcagcttgattgctgtgctgtgcctgaaagagacgcgggataatgatttgaatcgcgtgggctgatagaccgctatcgggggcaagccccctcccacatttgaatgtattcacaaatctaactctgtgaactggatcaagtgtgggaggggggcttgcccccgatgcttttagagctctaccaccacagcctgggaagcacgggtcgccttggcccgggccgcttcaatcgactcatcccgcgccaacgccacgcccatgcggcgctggccattcacctcgggcttgccgaacaggcgcagcgcagtatcaggttcgctcaacgcggcgcccaggttggcgaacgccgtctgggtcgactgcccttccaccaggatcaccgccgaggccgaagggccgaactgacggatcaacgggatcggcaggcccaggatcgcacgagcatgcagtgcgaactgcgacaggtcctgggaaatcagggtcaccaaaccggtgtcatgcgggcgtggcgacacttcgctgaaccacacctgatcacccttgatgaacaactccacgccaaacaggccgcggccacccagggcctcggtaaccgccttggcaacgcgctcggattcggccagggcaatcgggctcatggcctgtggctgccaggattcctggtagtcgcccttctcctgacggtggccgactggcgcgcagaaggtggtgccgccgatgtggcgcacggtcagcagggtgatttcgtagtcgaagtcgataaagccttcgatgatcacacggcctttacctgcacggccgccttcctgggcgtagtcccaggctttctgcacgtcatcgacgctgcgcagcaggctctggcccttgcccgacgaactcatcaccggcttgaccacgcacgggaagcccaggtcctgcacagccttgctgtagtcttcgaaggtatcggcgaagtggtacggcgaggtcggcaggtccagctcttcggcggccaggcggcggatgccttcgcggttcatggtcagcgaggtggcgcgcgcggtcgggattacggtgaagccttcggcttccaattccaccagggtggcggtggcgatggcttcgatttccggcacgataaagtgcggtttttccgcctcaatcaccgcacgcagcgcggcgccgtcgagcatgttgatcacgtggctacggtgcgcaacctgcatggccggcgcgttggcgtagcgatccacggcaatcacttcaacgcccaggcgctgcagttcgattaccacttccttgcccagctcaccgcagccacacagcaaaacgcgggtcgcggttggcgacaatggagttccgattcgggtcatctcaggtcctcaggggagcggatcattgggagaaaggccggcattttacatgaactgcaggaattggcctcagttggcgacggcccgcttgcggatacgccaggccatgatcagccacaccaccgtgaccccagcgaacttcgacaccagcgcagttcccgccaccgccggggtaagcgcgccgatcaggccgaagaagataaaggtgtcgaggggaatgctcagcgccgaactgatccacaggcggtcgtgcagcggacgcttggtgatgctgaacaccagccagtcgatacactcggacactgcgaaggccgtggcgctggcgagggcgatggccgggtcggacgtgacgtacgacagcaccagcgcggccagcatggcgatgattgcgccatggccgaagcgggtttgcaccatgtcgcgcaggataaagaccaggccaccccaggcggaccagatgacatccaggtgcggggcggtggagaaggcgaagttgatcagcacgacgctgctgatgtaggcgatcaggaagagcatgggagtggacctgtgaacaaggggcacagggtacttcacattttgaaatatgtcgtctgggtggaccctatcgggggcaagccccctcccacagttgaccgaggtgtcatggccggcgccgaacaatgtgggagggggcttgcccccgatagcggcggttcagacaccggatttgccaggcatcatccacaccaacccactcgccagcgcccgctcatgacataaccccagcaccacccggcgctcggcgttatccatgcggctccaacgcgtaatctcttccaccgtacgctggcagcccgtgcagatatcgtcatcgtccagcgcgcaaatactcacgcaaggcgacgcaacaggacgttcaatcgggttcattcttcctgctcgaccaggtcccgcgcataacgctgcgagttatgcacatagtgcgcggcgctggcttcgagcatgcgtttctgcgcgtcggtcagttcacgcaccaccttgcccggcgagcccattaccagcgaaccatcgggaatttccttgccttcaccgatcagcgaattggcgccgatgatgcagtgcttgccgatcttggcgccgttgaggatcaccgcattgatgccgatcaggctgtaatcgtccaccgtgcaaccgtgcaacatggcgttatggccgatggtcacgccggtgcccagcgtcagcgggtagcccatgtcggtgtgcatcacgctgccgtcctgcacgttactgttcttgccgatcaggatcagttcgttgtcgccacgcaacaccgcgttgaaccacacgttggcgccctcctccagcttgaccttgcccaccagggtggcattcggcgctacccagctgtgtggatgagtctcgacgcgggcgtcgcccaggcggtatttcatggtttttcctcacggcgttgccattcaaacgatggcttagatattgatgaaactcttgggcggttgatgcaggctgatcttggcgtcgtcatagagcagattgatcagctcgacgatcatgatcgccgtcagcccccagatcttgtattcgccaaaccgatagctgggcacgtaccaactgcggccctggtaatcgatccggtgggtatgttcgcgtgggtcctgtcggaagaagtccaagggcacgctgaaaaccgcggcaatctccgcatcgttggccaggtattcgacgtaatcagggatcacgccgacatacggcgtgacccgaatgccatgcagggagatcaaggggctcagcgggccgatgacttcgaccaggccgggtggcaggccgatctcttcttccgcttcacgtagcgcggtgaagatcaggtccgggtcttcggggtcgcggcgtccaccgggaaaggccacttcgccaccatgggtcgacaggccgctggcgcgcagggtcaggatcagctcaggttcgtcactgcgggtaatcggcaccagcaccgcggcctcggggaaacgcccgtcggcttcaagcaggtggggggtgtggttgcttacccgtcgaagtagctcgtccagcatgagtcatctcggtctgttggctaccttgcatcatgcaccaaagcgtacgggcgcccaaccccaaaacccgcccggtgtcgctaaacgacaacttgcagcgccctgcccgtcacgccaagatagacgcactttccaggaaccccagcatgaatttctgcagccagtgtggcaaaccggttacccaacgcatccccgaaggcgatggccgcctgcgctttgtgtgtgatcactgctcgaccatccactaccagaaccccaatatcgttgctggcacggtgccggtgtggggcgacaaagtgctgctgtgccgccgcgccatcgagccgcgcctgggttactggaccctgcccgccggtttcatggagaacggcgagacggtcgaacaggcagccgctcgcgaaaccctggaagaagcctgcgcccgcgtgcacaacctgagcatctacacgctgatcgacgtgccgcatatcaaccaggtgcatatcttctaccgtgccgacctggtggacctggactacgccgcaggccccgaaagccttgaagtgcagctattcgacgaagccgacatcccttggtccgagctggcgttccgcacggtcgggcgtaccctcgaatactatttcgctgaccgtcggcagcaggccttcccggtgcgcagcgaggccgtagagccgcgggtgttgcccgctccatgaccagggataccgttttaatgcgttggctgcttgcgcttatctgcctgtcgttcgcgaccctgtcatcagcctcgaccgtggaaaccctgggcggcaagaccgtcgaaaaggtcctggtgctcaagtccgcccatcagttgcagttgatcaacgacggcaagccgctcaagacctaccgcatttccctgggcaagaaccccaagggccacaagctgatcgagggtgaccgccgcacgccagaggggctctactggatcgactggcgcaagaccagcgaccgcttcaacctggccatgcacatctcctacccgaatatcagcgacgccgcccgcgcccgccgcgaaggcgtgaaacccggcagcatgatcatgatccacggcacccccgataccgaggaatacccggagcagtggttccacaccctggactggaccgacggctgcatcggcatgcgcaacgtggatatgcgtgaagtctggaacctggtcaaggacggcacactgatcgagattcgtccgtaatctcgtaccgttcgtaaaataattcaaaaaaaattcccatcccagcctgcgcccgccggtgaataccagttcatccccgcgggctgcgccgttctgcgcgcgataaagacctctctaataccacttgataccaggccccattgcagggcccttaaatcagtgaacgcactgttttcgctgcattgacatggtatttaagtggtattaatttccggccaataccgggcgacaacactccaataaccgcatcggaaacctgacagatgaatcccatcctggccctgcgccccgacgacaaacaatccacgccgctgtacctgcaattggcgcgcaaactggaagcagcgatccatgccggccagtggacgtccgaacaagccctgccatcggaacgcgtactcagcgagcaactgagcatttcgcgagtcaccgctcgcaaggcgctggaagtgttgtttgcccaagggctgatccgccgcaaccaaggctccggcacttacatttcgccacgcctggagcagccgctgtcgcgcctgtcggggttcagcgagatgctgcgactcaagggttttgtgcccagctcccaatggctggagcgtgaactgacccagccgacccacgaagagatgatccgcctgggcctgtcgcccgccgacaaagtggcacgcctcaagcgcttgcgtaaggcggacgacacggtgatggcgattgaaatgagcaccctgcccgccttggtgctgccgcagccccaagccatcggtcattcgctgtacgaatacctggaaggcatcggcaaaccggtggtgcgtgccctgcagcatatccaggcgatcaacgcctccgacgagttcgccaagctggtcggcatcgcccccggtaccgccatgctgctgatgacccgggtcggctacaccgccgacaacacgccgattgaaatcaccgacacctactgccgcaacgactactacgacttcgtcgcagagctgcgccgccatgactattccgctgaactgcgaatttagagaactgcccatgtccgaagacaacatcctcacgcccaacggctggattcgcggccgcctggtgcacgagcacggcaaggtggtcgccatcgaaggcgacccctgcgacccggctgacaacgaccggccctacctgctgccaggttttatcgacctgcacgtccacggcggcggtggcaaggacatcatggaaggcagcgatgccttcgagaccatcacccgcacccacgtgcgtttcggtacgacttctctgctggctacgaccatgactgcgccggtggatgaaatctcaagcgtactcggccagctcggcaccttctgcgaacggcgtccgacgggcagcgcccgcgtactgggtgtgcacctggaagggccttacatcaatccgggaaaactcggcgcccaacccaactttgcccacaccgcattgatggccgaagtggaagcctacctgcgcctggcgccgatccgtgtaatcaccatcgccccggaaatcgccggccacgatgccctgatccgcgccctcagtgaacgcggcgtgcgcatgcagatcggccataccctgggcagctatgaagaaggcgtcgccgccctcgctgccggcgccaccagcttcacccatttgtacaacgccatgagcccgctgcatcaccgcgagcccggcatcgtcggcgccgcactggcccacgccaagtacgccgaattgatcccggatttgctgcatgtgcaccccggcgccatgcgcgtggctttgcgctcgatcccgtgcctgtactgcgtcaccgactccaccgccgccgccggcatgcccgatggtgaatacaagctgggcagccacaccgtgaccaaatgcctgggcggcgtacgcctggccgacggcaccctggccggcagcacgctgaccatggaccaggcgctgcgcaacctggtgaagatcggcctgcccatcagcgaagcctcacaacgcctgtcgcaatttcctgcggactacctgggcctggaagaacgcggtcgcctgcaacccggcagtttcgccgactgcgtgcgcctggaccgcaccctgacactcaccgacgtaatggtcgaaggagaaaccattgacttcaaaaatgcttgaagaggccctggcctcctgcgacgccgtgtcggcgcaattgcaacgcctggacccactgctggaagaagtcgccggccgcctgcgccgccagccgccgcaagtggcgatgaccatcgcccgcggcagctcggatcacgccgccagctacttcgcctacctggccatgcagcacgtgggcatcccggtggcgtcgttgccaatgtcggtggtgaccctgctgcaagccccgttgaaagtcagcggccaagtggcgttcggtttctcgcagtcggggcaaagcccggacctggtcaacagcttgcgcctgctgcgcaaacgcggcgccctgagcatttcgctggtcaacgctgaagactcaccgctggaagccgcctgcgaattccacgtgccgctctgcgccgggccggagcaaagcgtcgccgccaccaaaagttttatcgccacactgagtgccagcgcgctgctgattggccactggaaccaggaagccgacttgctgcaagcctgccgcgccttgccggacgaactgcgtgccgccgccaggcaggactggacggtcgccatcgacgccctgcgcgactgccagcaactgatggtgatcggtcgaggcgccggttttgccatcgctcaggaagcggcgctcaagctcaaggaaacctcggcgatccaggccgaagccttcagcagcgccgaggtacgtcacgggccgatggcactgattggcgacaactaccccctgctggtgttcgccccgcgcggcgccgagcaagccggcctgttgagcctggccgccgacatgcgtcaacgcggtgcccgcgtgttgctggctgcgccggacgatatcgccgagcgtgacctgaccctgagccgcgccgaacatccgaccctggacccgatcctggcgatccagagtttctacgtgatggcggcaggtttggccgaagcccggggcatggacccggaccagccgcgtcacctgagcaaagttacccgcactcactgagtggcgttttcctgatgagtaccgtgcccatgtccaacaacaataatgacctgaccctcagcgcccccctcagcggaccggtgctggccctgggcaacgttcccgacgaagtgttcgccagcggcgccatgggcgagggcattgccatcgacccgttgaatgactgcctgcatgcaccctgtgacggcgtgatcatccacgtcgcccgcaccgggcatgcgctgacgatccgcgctgacaacggtgccgaaattttgatgcatgtgggcatcgatacggtggaactgaacggcgaaggcttcgccttgctggtgaaggatggcgcgcgggtaagcaagggccaggcgctggtgcagtttgatctggaccgcattgcacgccagtgcaagagcctggtcagcctgatcatcctgaccaatggcgagcgcttcgagttgcgctcggtggcggctagaacggtcaaggtcggcgagccgttgttgcagatcgtggcgcgttcggcgacgtcggtatcgacgcctgtggataactcggcgggtgaagccagcgcccgcgtacgcatcacccatcgcggtggtttacatgcccgcccggcggcgttggtgcgcaaggctgcgcagggtttcagcagccaggcctcgctgcactttggcaataaaaccgcctcgtgtgacagcctgatcggtttgctgggcctgggtatcggtgaaggggatgaggtgcgtgtgagctgtcgcggcaaggatgccgaagcggcggtgcaggcagtgatcgcggccttgtcagccgtcgtcaaggaagaacaccacaccccggtggccgccgcgccccgtcgggtcaataccgaagtgggtgtgttgcaaggcgtgtgtgccgcgccgggcctggtctgcgggccattgttccgcctgaccggtatcgaactgccggcagacaccggcaagcatgctgccgacgagcaactgcaacgcctggacgccgccctggagcaggtgcgcagcgaaatccgcagcaccctggatcatgcgcgccagcgcaggaacgttgaagaagaagacatcttcgccgcccacctcgccctgctggaagacccgaccctgctggacgccgccaccggcgccatcgagcagggcagcgccgccactcatgcctggcgcgacgcgatccaggcgcaatgcgccgtgttactggccctgggcaaaccgctgtttgccgaacgcgccaatgatctacgggatttgcagcaacgggtactgcgcgcattgctgggtgaagcctggcacttcgaattgcccgcaggggcgattgtcagcgcccacgaactgaccccatccgacctgctgcaactgagcgcgcaaaatgccgcaggcatctgcatggccgaaggcggtgccacctcccatgtggctattttggcccgtggtaaaggcctgccctgtgtggtcgcgctgggcgccgaagtcctcgatgtgccccagggccaacgcgtggtcctcgacgccgccaacggcaggctggaactggcgcccagcgatgcgcgccacgccgaagtacaccagattcgcgatgcgcagaaactgcggcgccagcaacaacaggcccaggcccgacagccggcacgcaccgccgatggcgtgagcatcgaagttgccgcgaatgttgcctccagcgccgaagccttggtggcgtttgaaaatggcgccgatggcgtcggcctgctgcgtaccgagtttctcttcgtcgaccgccgcaccgcgccggacgaacaggaacaacgccaggcctaccaggccgtgctggatgccatgggcgacaagtcggtgatcatccgcaccatcgacgtgggcggcgacaagcaactcgactacctgccgctgccggtcgaggccaacccggtgctgggcctgcgcggtatccgcatggcccaggtacgcccggaactgctcgaccagcaactgcgggcgctgctgcaagtcagcccgctggaacgctgccgcatcctgctgccgatggtcagcgaggtggatgagttgttgcagattcgccagcgcctggacgagttgtgcgccgagttggaactgacccagcgccccgaactgggcgtgatgatcgaagtgcccgccgccgcgctgatggccgagcatttggccaaacatgccgacttcctgtccatcggcaccaatgacctgtcccagtacaccctggccatggaccgcgaccacgccggcctcgccgcgcgcgtcgatgcgctgcacccagcgctgctgcggctgatcgcccagacctgcgcaggcgcggcgaaacacgggcgctgggttggggtctgcggcgccctcgcctccgacccgctggccacgccggtactggtcggcctgggggtcagcgagctgtcggtgagcccgccgcagatcggagaaatcaaggatcgcgtccgccacctggacgcggcgcaatgccggcaactgagccagggcctgctcgacctgagcagcgcccaggccgttcgccaagcctgtcaacaccactggccgctgagctgacaacaacaagaaaaaaggagactcgccatgtaccaacatttcatcgaaggcctgcaacgcctgggtcgtgcactgatgctaccgatcgcgatcttgccgatcgccggcctgttgctgcgcctgggcgacaccgatcttttgaacatcgcggtgatgcacgacgccgggcaggcgatcttcgccaacctggcgctgatctttgccatcggcatcgccgtgggttttgcccgcgacaacaacggcacggccggtttggcgggtgcgattggctacttggtgatggtttccacgctcaaggtgatggacacgtccatcaacatgggcatgctcgccggtatcgccagtggtttgatggcaggcgggctgtataaccgcttcaaggacatcaagctgccggagtacctggcgttctttggtgggcgacggtttgtgccgattgtcaccgggttttcggcggttgcgctgggtgtgatctttggcctgatctggccgccgatccagcacggcatcaacagcttcggcgtgttgctgatggagagcggcagcctcggcgccttcgtgtttggcgtgttcaaccgcctgctgatcgtcactggcctgcaccatatcctcaacaacatggcgtggttcgtgtttggcaccttcaccgacccggtgaccggtgccgtggtgaccggtgacctgacccgttactttgctggtgaccccaaaggtggccagttcatgaccggcatgttcccggtgatgctgttcgggctgccagcagcgtgtctggcgatgtaccgcaatgcgttgccggaacggcgcaaagtgatgggcgggattttcctgtcgatggcgctgacgtcgtttctgaccggggtgaccgagccgattgaattcgccttcatgttcctcgcgccgtttttgtacctgatccatgcggtgctgaccggcctgtcgatggcggtcaccaatatgctgaatatccacctgggctttaccttctccggtgggtttatcgacatggtgctgggctggggcaagtccaccaatggctggctggtgttcccggtaggcctggcgtatgcgctgatctactacagcgtgttcaactactgcattcgcaagttcaacctgaagacgccggggcgggaagatatccaggtggtgcaggctgaggtgatgacggataaccagcgcgccagtgcctatattcgtgcgctcgggggtgcggcgaacctgctgagcgtgggtgcgtgcactacccgtctgcgcctggacatggttgatcgcaaccaagcggtggatgcggagctgaaagcactgggcgccatggccgtggttcggccgggtaacggcgggagtttgcaggtggtggttgggccgatggcggatagcattgctgatgaaatccggctggccatgccttcgtttgttgccagcgcgccggtgaaggtttcccctgtggataagccggtggcggtgaatgtgcaggaggccgagaagtggctgagtgcgttgggtggccaagcgaatgtgcggcagttggaagcggtggcgatgacccgcttgcgcgtggagttgggagatgattcggggctgtctgaagctcagctcactgcgctcggttgccaaggtatgagtcagcttgagagcggtgtttggcacctgttgattggtgacaaggcttccgggttgggtgaggcgttggagcggttggtcagtggtcgagaggtcggcgccagggtttagagatgcagtggctgttctcgcctcatcgggggcaagccccctcccacagttgaccgcattgccaaggtgggagggggcttgcccccgatgaggccctgacagacaacaaaaaacccgctgaccaaactggcccagcgggtttcttgtttttgcagcatgcgaatcaaaagtccgccaactgccacacctcataggccggtgtctcatacgggtggctgagtttcaaagcagccacaacagccacaatcaactcatccgccaccaccaactccaccttccactcttcaaccccttcaacctggcccacctgtccgatgaacggctggctgccgtccaacgcgcggaattggccctggcccagcacttgccaggcgcagctgtcgtagttgccgatgcgcccgccgccggcggcaaagacggcgatcttcaccgtctccacatggctgtcgggcacaaagaaggcgagcttgtacaccgtcttagttcacccacacgcgggcgttacggaacatgcgcatccaggcgccgtcttcgttccactcttccgggcgccacgagttttgcacggcgcggaatacacgctccgggtgcggcatcatgatggtcacgcgaccgtcgcggctggtgaggccggtgatcccgcgcggcgagccgttcgggttggccgggtaggtctcggtgaccttgccatggttgtcgacgaaacgcatggccacgcaaccggacaggtcggcttccaataaagcttcttcgctggaaaactcagcgtgaccttcaccgtgggcgatggcgattggcatgcgcgaaccggccatgccttgcaggaagatcgagttggactcctgcacctgcaccatggcgacacgggcttcgaactgctcggaacggttgcgcacgaagtgcggccagaactcgctgcccgggatcagctcgctgaggttggacatcatctggcaaccgttgcacacacccagggtgaagctgtcgttgcgctcgaagaaaccctggaacgcatcacgcgcacggctgttgaacagggccgatttggcccagccttcaccggcacccagcacgtcgccgtaggagaaaccgccgcaggccaccaggcctttgaactcgttgaggtcaacgcgaccggcgaggatgtcgctcatgtgcacgtcgatcgcattgaagccggcacggtcgaacgcggccgccatttccacctggccgttgacgccctgctcacgcagtacggcaacctgtgggcgaatgcctttcttgatgtaaggcgcggcgatgtcctggttgacgtcgaagctgagcttggtgctcaggcccgggttgtcttcttccaggatcacgtcgaattcctgctcggcgcaatcggcgttgtcacgcaggcgttggatctggtagctggtctcggcccactggcgttgcagcaagcggcgctgaccggcaaaaacagtatcgccgttgaaggagatgttgatctcgccgttgttgatcggctggccgatcaccgccacgcagtcgtccaggccggcggcgctgaactgtgcaagtacgtccggggtagcgtcctggcgcacctggatcaccgcgcccaactcttcgttgaacaggatgccgttgatctcggccgcatcctcggcaacgctgtcgagcacgatgttcaggccgcaatgaccggcgaaggccatttcgacgacgctggtcagcagaccaccatcggaacggtcgtggtaagccagcaggtggccgtcggcattgaggccctggatcacggcgaagaacgccttgaggtcttcggcgtcatcgacgtccggtgcctgtttgccgagcttgccatgggtctgcgccaggatcgaagcgcccatgcggttctggccacggcccaggtcgatcaggatcaggtcggtggtgcccttgtccatgcgcagttgcggggtcagggtctggcggatgtcggtgaccggtgcaaaaccggtgacgatcagcgacagcggcgaggtgactgtcttgtcgacgccgtcttcgttccaacgggtggccatggacatggagtccttgcccaccggaatggtgatacccagctcagggcacagctccatgccgaccgccttgacggtgtcgtacaggcgcgcatcttcacccgggtggccggctgcggacatccagttggccgacaacttgatgtcggacagcttaccgatgcgcgatgcggcgatgttggtgagggtttcaccaatggccatgcggcccgacgccggagcgtcgagcagggccagcggggtacgctcgcccatggccatggcttcaccggtgtagacgtcgaagctggtagcggtgacggcaacgtcggccaccggaacctgccacgggccgaccatttggtcacgggccaccaggccggtgatggtacggtcgccgatggtgatcaggaagctcttgctcgccacggccgggtggtgcagcacgcgttcgatgctgtcggccagttccagcgtgcttgggtcgaaatcatcgcccagctcggcttcacgcacagcggaacggtgcatgcgcggggctttgcccagcagcacttcgagcggcatgtccaccgggctgttgccgaagtggctgtcggtgaccgtcagttgcggctcggcagtggcttcgccgaccacggcgaacgggcagcgctcacgctcgcagatggcttggaagcgcgcgaagtcttctgcgccaaccgccagcacgtagcgttcctgggattcgttgctccagatttcgtgcggggccatgcccggctcgtcgtttggaatattgcgcaattcgaagcggccaccgcggtcgccatcgttgaccagttccgggaaggcgttggacaaaccgcccgcgccgacgtcatggatgaagctgatcgggttcttgtcacccaactgccagcaacggtcgatgacttcctggcagcgacgctccatttctgggttttcgcgctgtaccgaagcgaagtccaggtctgccgagctggtgccggtggccatggaggaagcggcgccgccgccgaggccgatcagcattgccgggccgccgagcacgatcagcttggagccgaccaggatctcgcctttcttgacgtgttcttcacggatgttgcccatgccgccggccaacatgatcggcttgtggtaaccgcgcacttcatcgccacgcggggtggtgatggactgctcgaacgtacggaagtaaccggtcagggccggacgcccgaattcgttgttgaacgcagcgccgcccagtgggccttcgatcatgatgtcgagcgcggtgacgatgcgctcaggcttgccgtacggcacttcccacggctgttcgaagcccgggatctgcaggttggagacggtgaaaccggtcaggcccgccttgggcttggcgccacggccggtggcgccttcgtcgcggatttcgccgccggaaccggtggctgcgcccgggaacggggcaatcgcagtcgggtggttgtgggtctcgaccttcatcaggatgtgcaccggctcctgcaccgcgccgtactggcgggtctcagggtccgggaagaaacggccggcgacggagccgacgatcaccgaggcgttgtccttataagcagaaagaacaccttcgctgtgcatcacgtaggtgttcttgatcatgccgaacaggcttttttcctggctttcgccgtcgatgtcccaactggcgttgaagatcttgtgacggcagtgctcggagttggcctgggcaaacatcatcagttcgatgtcgtgcgggttgcgcttcaagccgttgaaggcattgaccaggtagtcgatctcgtcttcggccagggccaggcccagttcggtgttggccttctcgagggcggcacggccaccaccgatcacgtcaatcgcggtcagcggcttgggctcggcgtggctgaacaggccggcagcctgttccagctggctgacgatgatctgggtcatgcggtcatgcaggctgctggcgatcagctcggcctcggcatcgctgaactggccggcgacatagaaagcgataccacgctccaggcgctggattttctccaggccgcagttgcgggcgatatcgctggccttgctcgaccaaggcgagatggtgccgaaccgtggcagaaccaggaacaagcggccagtcggctcttgaacgggaacgcttgggccgtacttcagaaggcgtgcgagcacttgctgttcgtcggcggtcaatacgccggtaacgtcggcgaagtgagcaaattcagcgtacaggcctgtaacagctggaaccttctggctcagttgctcaaggagtttgctgtggcgaaaggcagaaagggcaggagcgccgcgcaggatcaacatcttcgggacagcctcgggaagggggtgtgctttgaggccgtgcattctagcgtaaaccgccgccaacggcacccgaaacgctaccggtggctgccgccgaacgtcagttggccggattacacccctttcgcggggtcatagggggcattcggcgcagttattttaaccgtcacaatccctcgccaagccgcgtttctgcgggttgcagcacagttttgccagcgctagcagacaacgcccatgctgtcgagatatggcgccgtgggccgtttgcgtatactgcgcagatgttctccccaacggctttgcgaccgcgatgcgccaaatggctcatcgccaccggactcttcctgatgctcagcgcctgtgttgataaacccagcacgctcgagcgaatcaaggaggatggcgtattgcgggtgatcacccggaacagcccggcgacttatttccaggaccgcaacggcgaaaccggtttcgagtacgaactggtcaagcgcttcgccgacgacctgggcgtgaagctggagatcgagaccgccgacaacctcgacgacctgttcggccagttgggcaaacccaacggcccggtcctcgccgccgccggcctggtcagcagcgaacagcgcaaggcgcaggtgcgtttctcccacccttacctggaagtcaccccgcagatcatctaccgcaacggccagtcccgcccgacgaacgcggcagacctggtgggcaagaagatcatggtgctcaagggcagcacccacgccgaacaattggcggcgcttaaaaagcagaatcctgcgattgaatacgaagaatccgacgccgttgaggtggtcgacctgctgcgcatggtggacgaggggcaaatcgacctgaccctggtggactccaacgaagtggcgatgaaccaggtgtacttccccaacgtgcgcgtggcgttcgacctcggcgatgccagcaaccagagctgggccgtggcgccgggtgaagacaacagcctgctcaacgagatcaacagctacctggataaagtcgaaaagaacggcacgttgcagcgcctgaaagaccgctactacgggcacgttgatgtgctcggttatgtgggtgcctacaccttcgcccagcatctgcagcagcgtttgcccaagtacgagaaacacttccgcgcctatgccaaggaagaaaaggtcgattggcgcctgttggccgccatcggctatcaggaatcgctgtggcagccggccgtcacctccaagaccggcgtgcgcggcctgatgatgctgacccagaacaccgcccaggccatgggcgtgtccaaccgcctggatcccaagcaaagcatcatgggcggcgccaagtacctggccaagatcaaggatgaactggacgacagcatcgccgagccggatcgcacctggttcgccctcgccgcctacaacgtcggcaccggtcacctggaggatgcgcgcacgctggccaagcgcgagggcctgaacccgaacaagtggctggatgtgaaaaagatgctgccgcgcctgtcgcagaagcagtggtacagcaagacccgctacgggtatgcgcgaggcggtgagccggtgcactttgtggcgaacatccggcgttactacgacatcctcacctgggtgacccagccgcagctggagggcaaccaggtggtcgaaggcaacttgcatgtgccgggtatcgacaagaccaagccgccggaagataaccctcaattgtaagaacaccacaaaacccggtgggagggggcttgcccccgatagcggtgtgtcagttactactaagctggcagatacattgcaatcgggggcaagccccctcccacattgggatctctaccgggcttagaggccggtaagcaggtggaccactccgcctgcgagcatcatcactgccggtactcccgccgccttcaacgccacctcatccaaccgccccacatcctgcaactgcaccctcacccgcgtcaacgccacacgctgctgcgacttgaggttgtccgcgccgcccagcgcgctgattacttcggccggcaatagactctgcgtcggtgttgctacggtctcggcaatcaaatccggcgtcagggccttccagaacgcccgctgcaatttctcgaacatgctcaaagctccatgacaggtgaggtttcaacggtagctgcgtgatattggcgcagggcctcacgcacttgggcggcttcttccaggcccaacacttggcgggcgatgatctggcagtcggccaggtccagttcgcgcacggtggccttgatggtggggatcaacggcacgctgactgacaactcgtccacgcccagcccgatcagcaccggcgcggccagcgcttcggaggccagcgcaccgcacacccctacccacttgccatgggcatgggcggccttgacggtggtggcgatcaggcgcagcaccgccgggtggaagctgtcggcctggctggccaggcgcgggtggtcgcggtccatggccagggtgtattgggtcaggtcgttggtgccgatggagaagaaatccacgtggggcgcgaacacatccgccatcagcgcggcggacggtacttcaatcatgatgcccagcttcggcagctcggtaagccccagcgccagcgcttcctcttccagaatcttgcgcgccaggtgcagctccgacagcaggctgaccatcggcaacatgatgtgcaggcgcgcaaaaccggcgctggcaaggatcgcgcggaactgttcgcgcagcagctcaggacgttccaggcacaggcggatgccgcgcaggccgaggaacgggttggtttcggcatccatcggcacataggccaacggcttgtcaccacccacgtccagggtgcgcaccaccaggttgcgctcggtgcccagggcacgggcgatggcggtgtaggtggctgcttgttcatcggggcctggcgcacggttgcggtccaggtagagaaattctgaacgcagcaggccgacgccttcaccgccgagggtcagggattgctcaacttcctgcaaggaggccacgttggcggtgacttcaacgtgatggccgtcgcgggtggtggcgggcaacgacgcctgcgccacatcgcgctgatggcgcagcacctgttgcttgcgggcagtttccaactgctcgatttcggccaggttcggctccaggtgcagctcacctttgtcggcgtcgagcagcacctgtttgccattggccagccccagaacctcggctgaaacaccgcaaatggccggcaggccaagggcacgggccaggatcgcgacgtggctggtcgcgccaccgccgacagtgacgaaccccagcactttgcgggtatccaggctcgccgtctgcgaaggggtcaattgctcggcgatcaggatcgcgcgctccggcaagtcccaggcgctgtcctggatgcccaggatcagtttcagtacgcgctggccgacgtccgccaggtctgccgcgcgctcggcgatcagcgcattgcccaggccctggaacagcttgacggtcgcgagcgtggcactgttccaggcaaacgcggcgctcttgccctccgccaacaaactgtgggcgtgttccagcaaggtcgggtcttcgagcaattcctggtgagcgcgaaaaatctcggcctgggcactgccagcagccttgtcccgcagcgcctgcaatgcctcagtggcagccagcaggccacgcttcaaagcagcacgctcagtggcttcacccgtgccatgttcagtgatggtcaactcaggttcagtcacttgaaccacctggccaaacgccgaccccggcgatgcacacacgccacctagcacggtcgccgacgactgcgttgccaacggctcggcaacgctcgccactacctcgccacaaccttcagccaacaaggccaccagcgccttgatcgccacttcggcatcctcacccgcagcgctcacctgcaaggtatcgccgtgcacggtttgcagcgccatgatcgctaccagtgatttggcgttggcgctctgggtttgcttgtgcaggtagatgctcgccttgaagcccttcgcggcctgggcgaacaccgccgccgggcgggcgtgcaaaccgttggcattgggcaaagtcagcggtttggagaacagtgcgtcgccctcctcttcgtccactgtgtcaacggcttcacctggggataactgcaacagcggctggccgacctctacacaatcagtggccaacacgctgaacggctcgccgctgaccaccagcatcaaggtcagcagactgcgcgcatggagcgccacatagtcggcatcgaattcgatcagcgcctgcccggcctccacccgctggccttcctgcaccaaccgggtgaagcccttgcccgccaggttcacggtgtccaggccgatgtgcatgagcacctggacgccgttgtcgtcggtaatgctgacggcatgaccactgtcctggatattgctgatcgtcccggccaatggcgcgcagagggtctgcgacgtggggtcgatgcacaggccatcgccgatcaggcggctggagaagaccgggtcgggcaccttgtccagcgccagcagcacacccgacaagggcgccagcaattccaggggttgcgttgtggtcatgacttcacctgctgttttgttctgtagatatattgagcggaggaaggatcacttccaccagtactcaacctgcacaccaacgttcgacccatgccgcgccgtgccatacgagccggtatcggacaacgccgaccccgccgccaattcattcgccgcacgcttggccgcttcgttccaggtggcataggtgtagtacaagcgcacctccggccgcgcccagaaatccgggcctttgggcgaccaggtcggggcgaaggtgaatttgctcagcttgcgcgtcccgcccgtagcctcgacctgatcatgcccaagctccgtgaccagtttgaactgctcgctgatggcgtacgccgggcgcacaccgagggacatccaggtctggtcctggctgcccggacgaatatccttctggtacaccgcttcgatctgcccaccgaaacgcggggtcacctgccagtcgaaaaactccacggcgcggtaacttttgctgctgttgtccaggaaggtattgccggtgtaacccaggccggtgccggggccttcgccgtactgcaaggcgaacttgttcttgccgcccaggaaaggtttttgcacgtgctgcgcggtgatcgcccagccgctgttggtgtcacgcccgccggctttttcgatgtagctaaggcccagctccagctccccgccggggttggtcttgaagcctgcaacgttgaagtcatgacgggtcgcgtattccttctggtacaggttgtccttacgagaaatggcgtagctgtacttgaggtcgccgatcagcacgtcctcgataccaccgcccgtggcgctctggttccagtagtagaagtcggagatatggatgtcattacgtttgtagtaacgccggccggcccacagtgaaccgccattgaggctgggcaggttggaccactgcgcatacatctgcggcatgcgcgcggtgccgttgtcttcgccctggaacttcagcgcgcggtcgtacttgttgtagagcgatgccatggcatcgacgctgagcaccgagccgtcgtcgagggtgagcaggtcctggcgcagctccagctcggcgtattgctcgcattcgttacccaggcggtacttggattgcgcccccggcagttggaagcactgctgcgggccgctgcccgtggaagtgcccgcgccgctgcgcaggtaaccggcaaattccagggcttgagcgccgaacggcaagcccaggcaagacgcaacgaggcccagctttattgttgttttcatgaagcactccgatatttttattatgttttttgaagcgccccgtgctcccacacggggttacaacaggtctcagtccttgaggtgcagcacgaacgattcgtaaggacgcaatgcaaccgtgcccgttcgcaccgggcagtcggggtagttgctgatcagcaggcgttgctcggtcgcctggttgatcacgttgtccggcagttggatttcgcagggcgtgccgtagaagttgttcagcaccagcagacgctcgccctggccttcgcgcaggtacgcccagacttgcgagtggccttgcagcagctcgcgataaactccttcttggatcagcggttcatgacggcgcaacgcaatcaatgcgcggtagtgatgcagcacggactcggggtcatccagctggctttcgacgttgatgatggaggcgttggccggaatgccaatccagggttcaccggtactgaaaccggcgttctccccggcatgccactgcatcggcgtacggccgttgtcgcgggacttctgcatgatcgccgccatgctcgacgccgcggactcccccgcatcgcgcttgagacggaagatgttcagggtctccacatcgcggtactgctcgatccggtcaaagcccggattggtcatgcccagttcttcgccctggtacacatacggcgtgccctggagaaagtgcagcgcggtggcgagcatcttggccgagaccacgcgatgctcgccgtcgttgccaaagcgcgagaccacccgcggctgatcgtggttacaccagaacagcgcgttccagccaccaccggcctgcatgcccagttgccagtcagagaagatctgcttgagttgcaggaagtcgaagtcggccttcacccacttctgcaggttcgggtaatcgactttcaggtgatgaaagttgaaggtcatcgacagttctttcgacgcaggattcgagtagcgaatgcaatgctcgaggctggtggaggacatctcgccgacgttgatcaggtcatgcccttcgaagacttcgcggtgcatttcctgcaggtattcgtgcacgttcgggccgtcggtgtagaagcgccggccatccgtgctgtcctcggggaaatcggcgggcttggagatcaggttgatcacgtccaggcggaagccgcccacgcccttgtcgcgccagaagcgcatcagcttgaacacttcggcacgcaccttggggttgtcccaattcaggtctgcctgggtgtggtcgaacaggtgcaggaaatactggccggtttgcgcctcgtattcccaggccgagccgccgaacttggattcccagttgttcggctggtcgcgccagatgtagaagtcacggtacgggttgtcgaggctgctgcgcgcctgctggaaccattcgtgttcgatggaggtgtggttgaccacgatgtcgagcatcagcttgatgccgcgcttggccgcttcgctgatcagcaggtcgcagtcggccatggtcccgtagctggggtcgatggcgtagtagtcgctgatgtcgtagccgttgtcgcgttgcggcgagcgcaggaacggggtgatccacaggcagtcgacgcccagccatttgaggtagtcgagtttgtccacgatgcccagcaggtcaccggtggcgttacccgcgtggctgtggaagcttttggggtagatctggtagatcaccgagtgttgccagtcttgcatggtgggttccttcagttgattgttgtgcaggcctttcgggcctcatcgggggcaagtcgagtcgtcgcaccgcccctcccacatttgaaatgcgttccaatgtgggagcgggcttgcccccgattgcgccggttcaggcgacgcgatacccaggccgaacaatcttcatgctcaacgcacaggtcaaaacgaacggcacgacaatcgcgatcaccatcccgatcacaaaactggggatgtactgcggcatgatcgaaatgaatccaggcaagccaccgacgccgatcgccgacgcctgcaccttgttcagcgacaggaaaatactgcccagcgccgagccgagcagcgcggcatagaacgggaacttgaagcgcaggttcacgccgaacattgccggttcggtgatgccgaaatacgcagaaatcgccgaggtcgaggccatgcttttgtcccgcgcattgcgggtcatgtagaacacaccgagcgcggcgctgccctgggccaggttggacatcacgatcatcggccagataaaggtgccgccctgggtggagatcagttgcaggtccacggcgaggaacatgtggtgcatgccggtgatcaccagcggcgcatacagaaggccgaaaatcgccccgccgaccatcggcgccaggtcaaacagggtgaccacgccttcggtgatcaggatgccgaggtgacgggtcaccgggccgatgatcgccagggcgagcacgccggtaacgacgatggtggtgatgggcacgacgagcagctgaatcgcattggggacgcgtgcgcgcaaccatttctcgatgacgctcatcacatacgccgccatcaggatcggcaggatctgcccctggtagccgactttttcgatcttgaaccaaccgaagatatcgaagtacggcaggctctggccgtcgagaccagcgaccgccttgccgtagttccaggcgttgagcaggtccgggtgtaccagcatcaggccgagcacgatcccaaggatttcactgccgccaaaccgcttcgccgccgaccagcccaccagggccggcaggaacacgaacgaggtgttggccatcaggttgatcaggctccacaggccatccagattcggataggcctccagcagcgtcttgccctcgatgaacatgcccttggcacccatcaggttgttcacgcccatcaacaggccggcgatgatcaacgcgggcaggatcggcatgaacacatcggagaacacgcgcaccaggcgctgcatggcgttggtcttgtcggcgcccttcttcttcacgtcagcgatagtcgcggcggcgaggccggtctgttcacgcagggcggcgtagaccttctccacttcgccggggccgatcaccacctggaacaatccaccggtgaagaacgagcccttgaccagatcgacctggttcagcgcgcggctgttgaccaggctcgggtccttgagcgccaggcgcaggcgggtcacacagtgggcagcttgctcaaggttgtcgctacccccgaggttctcgagaatctcgcgggcgatagtcgaatagtcgtggctcatgcttggtttccactttggtttttttttattgggggcagtcattggcagcacgccgagggcaaaagtactcgtctgtacgagttaaagcaacaactcgtctgtacgagttacatattgtttattttttgtaggacgccgcaccgctgcgcgccgcataaatccaagggtccaatggacaaaccccagccgggccactaaggttcctgccttgaccgcaaccccggcaaagagccatccccatgagcaaatacaaccagatctatacggatctgcttgccagcatcacgactgaacgcctgcaacgtggcacgcgccttccctccgaaaccgaattgatgaacagctaccaggccagccgaggtaccgtgcgtcgcgccatcgagcagttgcaggagcgcgggtttgcgcaaaagatccacggcaagggcaccttcgtgttgtcgcccaacccgatcgagttccaactcggcggcatcgtcagcttccacgaaacccacgccgacctgggcgacgacgtacgcactgaagtagtcgagttcacccaattcccgctggaaggctcactgctgcaacacatcgaagccgaacccggcaccctgatcacccgcatcaaacgggtacggcgcatcggcggcaaacgggtgatcctcgacatcaaccacttcgtggccgacgtgatccccggcctggaccgctcgattgccgagcagtcgatctacgcgtttatcgaacagactttgcaactgcaaatcgcctacgcccaacgcaccatcgaagccctgccgcgcagcaaggatgaccagacacacctcgacctcgacggtcagagccatgtgatcgtggtgagcaaccagacgtttttgcaggacgggcggcagttcgagtacaccgagtcgcggcatacgttggataagttttacttttcggatattgcgcggcggtaggcacaagtcggggaggtcattgcaccgcgatactcttggccagtcctgccgtccacgcagcagtcatcttctcccctaccagcaccttgggttgaacacccgacacccccgagtaggtggcgtagattttcagaaggtcgtcaaacaggtctttggccccgtcatagaccaacagctcggagagcttgacctcaggcggtgactcaccatccgcgtcatgggcaacgctgatacgccccaactgatgcgggcctacaatgctcaacaacgcgaagtcgtcaaagccgcgcaccgacttgctgaagcgtcgcacaagttcgtccttgagatgtccctcggggatatgcatctcgaacagaggatggactccatactcccagttgtagctttccaggcgcaccggcatggtcagggagacggcattctcttcgctgacggtgtcgttatatgagaaaaccgtatcgcggcagctctcctctccctgcccgagcgttcccgcaggcacgccgccttcgccgatatagagccgctcacgtcgactggtcatggatattctccgatttcagctcatcaagggtcttgcgccgacgtttggggatggccgtcaactcatatcccaagccctcaagaatggctgcgaccttgcgaatccccacttccgggatggtattgttctcaatccccgagtacaaacctgcggccggagctgccttgattcagcctggaactaggccgctaatgccgacgactccattgccaatgacgcgttataaaacatgatgagtagatactttccctgtcgtcgggcattggccggcttatacaaagtctgggtggtgatgctcagcgctcttctcatcgcctgccaatcaccgcgcgaggctctgcaacaactggctgaggagcaccatcgacaatgggaggtcctgccgggagagcactttcctctcttcatacttgcgccgcacactgcagaaaagatcactcgcctgcgtgtgtacctggaaggcgatggtcattcctgggccacggccactcaacccagcctggatccgagcccgcacaatctgttggtaccacggctggcgatcaatgatccgacaccgaatgcgtacctggcacgcccctgccagttcgtcatggtcgcagcctgcgaatcagcgctctggacccaccgacgattttctcaggaagtggtcacccgcctcagccaggcgctggatcaattaaaacagcgctacggcaacagtgagttcgaactggtcgggtactccggtggtgccgcgctcgcattattgttagcggcacagcgcaatgatgttacccaggtgcaaaccctcgctggcaatctcagtccacgcctgtgggcgacgatgaaaggcctgtcgccactcgacggttcactggatccgctggactatcgtagtcaactcgccttgttgccccagcgtcatctcatcggcgaagcagacctgatcgttccaagtcgtttggcggacaggtatcaacaggcgcttgactcgcccctctccgaattcgttcatgtaccgggagcaagtcatgacagggggtgggaagcgacgtggagccgatgggataaaacaccattgatgcatgagaatcctgaaatcaagggaaaataggtccgcttaaaaacatctgaataccattcccctagcgcgaccataaccaccacctaaaagtttcatttgttgctcaattaccccgtaataccgcgaaaaataacggtaacgtcgcatttattagatttttttcgtcacttatcctttttatgatgaattgtcctacaggcatcgtgtagattcccacgcgcttgaatcagcaattcactgacaagctggcagggatgcctaaaacagacgctgacgcgtgggttgttccctgtcagtttctgccctgtaaggatactgccttgaatatttcccacctgcgccgctctttgttggcgctgtccgtcgcgactgctactgcgacagcatatgccgtacccgcccccgacttgaaccacgacctgagcacaggggcatacagcagctccggtgacgtattcaataacgccaccttcaccgggacatcgcaaaacgcaggtgtagagctgaccaacgtgaccctggcgggcaacctggtcaaccagggcaaaatcaacctgacggctgccacccccaccgacttcccgtccggtatcgccatgaccctcaattccaacgtcggtggcgacttggtaaataatggcgacattacggtgagcggtgacgccgtcgtcgggctggacctgtatctggcaaagatcgctggtgaagtgaacaacaacggcaacatcactgtgacaggcgccaatgccgaaggcatgctgatcacctcgtcccaggcgcgcatcaataactcgggcactatcaccgcacgtggcatcgactctgtgggtatcgacatcgagaacgcacgctttacgggtcagatgacgagtggtatctacaacagcgggactatctccgcagacggggtcggtatccgctttcgcagtctcgacacctccggcggttccgacaccctctccatcaggcagacaggtggcctgatcgaaggcggcagcgcagccattctggcggacgacaatgccccacgttcgtatttctactgggagggtggccaggtcaagggtgacctgctgggcctgagtggtgtgctggtgcgaggggacgcgatgttcgatggctcgaccatccgcgccggttacgtcgatatcggcgatggccgcctgacgctgcttcgcccgcagaccacgattgtgggcggcctcgacctggacagcgccaccgcgcgcctgcgcctgctgctggacaacaacacactgcccaacacgccgatcctgaaagtcactggcaataccttcttctctgcaggcagccagatcgaattgcaggcgcgctctgatgacttccgcacgtcggcccagggcacgcgctacaccttgatcaactctggcacctgggaagacccgcagaacctgtccgtggtttcctcctcggcgctgcttgaggtgaggagcttcggcatcgaaggccaggacgtgaaagcactggttgccacccgcagtgatgaggtaatcacgcaagacctgatgagcgcccgtggttcacgcaacgcggtgagcgccatcaaaccattcaagaacacgctcatgggccaactggacgaaagtgacccggtgttccagcaattcgccaacgccgcctccagcgaagaactggccaaactggccgaaagcctgagcccggacgtcagccgtggcgcgatcaacgcagccaccagcagccagaacctggtcgccagtaccctcaaccgccgcgccagcaaagcgcgtagcggcctgtcctccggtgacgtgctggccggacaaggcgtatggctgcaggcactgtccagcgatgccaaccaggacagccgcaacggtatcgacggctatgatgccaacaccaacggcatcgccgtgggcgccgacggcaagctcaacgccgataccacagtgggcctggcttacagctacctgaccagcgacgtgaaaaccgaccagggcaacaagaccgacgtcaacggccatgcactgaccctgtacggcaactgggcccgtgacaacttctttgtcgacacctcactgatgtacggctggaacgacaacgaatccaaacgctacatcgccggcacccgcgccaaggccgactacgacagtgagattttcggcgtcaacgcgctggcaggctacacattccagctcgacaaacagtggctgctggaaccacaggtcggtgcgcgctatgccaacgtatcgattgattcgtaccgtgaaaaaggcagctcagccgccctcaacgtcggcagccagcgctatgaaatcggcgaaatgggcctgggtgctcgcctggcggccgcttttgacgtaggtgtgggcagctttgaaccggaagccaagctgatggcctggcacgacttcatcggcgacaaggccggcaccacctccaccttcgtgcttggcggtaccccgttcaccaccacaggcgcaacaccggcgcgcgacagctacgagttgggactgggcgccaactaccgcgtgggcgcgtggagcgtgggcgggacgtacaactacctgaccagcagcggtttcgacgccgacaccttcactgcgaacgtgcgttacgacttctgatcaacgtctacgtctgaaatgaaaaaaccggcctaagccggttttttcgtacagcgctgcgggatcactcccactctattattaatagctaagtactgggccttaaaaatgcaggcattaaggccgtgcgcaagggtgaaaccatgaaaaataccatgagcacgattttattcccgagggtccaaactgctggaagctacggatttcaagtcaacgtgagtgttcagctgacgaaacacgacagccagctcatcgccgtcgccacctctacggacatccgcgattaattcaatcacatacgacggatctctctgaaaaagctctgccattgcctcatcgtgactgcgatctttcatcacctacctccgcattgagcgcgagcaagccaaatgctcatttgatccttgttgattttcttagcatgtttgctctgtctaaacggctcgcagacattgcattttaagcccgctatcacagcgagaggcatgcgccactagcggtagaccaatgtcaacgggcccccttggcctgcatagctttaccatcacagcccccctgggaacgatgctgccacagaaacctctggcatttcagcttcttaaatggtgccaaattgatatgatcaaactctgatcggtctctcgatgaatgtggccgatgagatccaaactgatgatgcagtcgacctgaattctacggataggagtcgcccatgttgaaccacgaagccaaacgaataatcgatgcggaaataatcccgaaaatggagaccgggaacctaactctgttcttgggtgcagagacattcgctggcacgccatccctaaatggcaaaggagttccgtccaccgacgagcttataaagcgaatttttgagtcggcaggatatcctccagaggaagccctgctaaccgactttcctactgcttttggtgcgggccaggacgacatcgacgactttgataattttttaacatcaaactattcggttagctcagtacatacttggcagacggacatattcaaactatggtggaaaacaattttcaccacgaatattgacaatatagcaaacgaagcattagctcaaaacaagagatcaggacttagctatcccgattataaaatatacaattactcagatagtgaacctgttcatgcgatacccacctcaccgccaatcgtatatctgcatggtacagtaaccaacatttcagccggtgtaatgatcgacggaattagctacggaatcacctcttccaaacaaagcgaatggctgaccaagtgcgcattgaacatcgaatatggcaactgtctatttatcggttcaaaattcaaagggtcagctatagatagcgccatacgatcaaagagtgccgcagacagttttaacagcagggaaccaagctgggtagttggagaaagctttacacaaatagaaaaaagccactacctacgaaaaggaataacgcccctagtagctgatgctggcgattttttttcgtacttgaaatctcaaataagccacgtatccccagaaaagttcttaaaacgtaaagccccttacctagcaggcaatgcaaaccgctccatcggatggttttccgagaatttcgaacacattcctacaaagttagccttagctggcgaagaaagtggtccatactcacgattttacatgggcgacttaccagaatggttctacgtgtcgcatcatgttccggcagtactcccagcacacagagccatcgtttccgaggttaatgcttttttaaatagtgactcaaaatgccgacttatcgctgttacaggaccattaggatcggggaaaacaaccgcatgcatgatggcagcagccgagatctcggtcaaccatcttaacgtgcatcactttaacggtctaaacggtatagaaattgagcatctctggaacactattaaagacacccgcggcctattctgtttagtaatagatgcagcatatgaacatttctacgctgtaaacgccgtttttgaaaggataatggatagagcaacctcttgtagattatgcgttattatagaagaacgaactcgtcaatatgaaagaaacaaacatcactttatgtcaagccaacttgacaatattcgccaaatcaaagtagaaaatcttaatttagcaagtgccaccaaactttatgacaaatcgttcgagttgggcataagattcgaaaaattaataggcaaaacaagaaaaaattcaatcaaagaaattattgattttgacaaagggtataaaggggatctccttgcaactttgtacgatttatcatcacgcaagtcataccgagaaaaactggcagaagagtatcgagaaattgacacccaggaagcccgcgaagtttaccaaacagtagcattggtgactgccgcgcgcctgccactaccgctaaacttcattgctgagactcataacatatcagtatcaaatttagatcgaataatttcagatggtttgagagataaaattcatactcacggcgtagctcgtggcgtctctgcgcgacatcattcgatcgcagaatatcatctcgcttataacattccgcaagaagacatcaaaactcgtcttattaacttgatgatatgcctcgcaccaaagtttacaattgaagacataaaacatcaccctttgagttacaaaatatatcgatccacactctccttccactatttgacggagaccctattcagagggagaaagaattattcatacatacatgaaatttattcgaaatgccaaaatctgtttgcaagcgacggcgtattttggcttcaatatggtcgttttctagaaaaagatgctgatatagaaggggcaatccactgctttagaaaaggtttgggactttatgactcatttcaagttcgccatgctctagggcaaactctgttaaaaaaatatatcaagaatgattattcagaacgtgagctgtacgaggaagggactgccatactcctacgggagatcgaaatgcgcgggcaccacgatgtataccccttcacttcgctagggcagtgcttaattcagattgtcgaaagcaacccttcggacgaagattccttgaacatgttaaaaactgtagtaaataggggcataaaacatcaccaggccgacagtgtttttatggatattttgaagcgatacctcaggttcaacccagacatgacaaacaactaatcgcctccccaaagagcaactgcaagcaaattagttgctcttttaaaactaaaaatcgtctatttatattagattacattgacacggaaagcatcatgattcttgctcatatattcatagcagagcataaagcgttacgtagaatcaacgtcccacttaacggcagctttcgctgcaacttccacaatagcatcttgcatcttagcaaaccgaaaaataccgctgaatattatcatgatcggtattgctcagctctgattggtcccaatggagttggaaaaagtagtgttctcgatatattggaaacattaaacggcaccagcgactctagtgccttgataattttctttgacgaaaccgaagaaaaatatcacatctgcccaatcaacatctccccaaaggagatcaaagaaacaacttgcgacaaagaattcgtatttgtcacaaacagtgcccaattcttatcagaccacaacataaactttgttaaaataaattcaatatcttcgagtgaagatacactaaacttcaaaaaaaccaaacactccccaaacattcacaatctcaccatatatgaaaatgtcaaaaataacgcaaggcaacgtaaatactttgaaaaactgttggcatacttcagagactccttcaacagagaagagttcatggaagagattgttttcgaattcgttttctctagctcgcctattactattgccaaacgaagtatggagacgatagcttcagaaaaagaatatatagaaaaatggataacttacgaacctcaattcgagttatcagacagcgaaatctcacacggcgcagtatttcaaaaactaattgaacttaacttcctatcaatatcaagtgctctagccaaagcttcgaacgccgaagaaaagactcttccgagcatactctttcagtttgacaaaacgtatcatgtaagccctatcggaatgagcacttctaataggctccgaaaagctatcaaagatttagagattgcagattggcccgattttgtacagaactcaattaatcaaggagaaagtgaagaaccattctccaaagatcagattaattttggaaacctccaagctttacttgagaactacctagagattttcgaagaaatagcaacaattctattcgactattgctatgacggcgaaaaacttaacctcaagagtgtaaagacagactattacgatgctgtgcaggatttgaccggtgcgattaaccgtctgccttcgaatattgccaacaacatatcctggggttggcgtggtattagtagtggcgaactagctagaacccacattttctccgaaagctatcactacctaaaatcaagcgattcaaaatctaacaccattttcgtctttgatgaagcagatctgtacttgcatccagaatggcaacgtacatttatccaggaaatgcttgatcacctgagattaatagaagccagccgagatattaaaacctcgcagattgtcatttgtacgcactccccaataattatcagtgatttcctgcctgacgacatagcttcattaacaaaaaatgaagatggcgatatagtagtgacaaactcatatggattcggcaacagtatcgtagatatatatataaaggggatgcatttaacctctacttttggagagcatgcacgtcgcaaaatcgagtatcttcttagaaaagcagaacaaagtacactcacctctgatgatagagaattgatctctaatataccaaatcctaacacaagaaattttcttttaaatcatgataaagatcaataaggctttctcatccgacttcaaggaaacatacgttcagtatgctttgaacgtagttctttggcccaacatttcaaagctcgttgaaactatccctcacattcataggaaactagctaagcaaacattcgataagcgctttcttgaggttttgctaagaagcgaacccgcgtcattcgaggacatcattcaaaggctgtacacgctattcccctatatagctgagagatattgctacagctacctactaaaagaaattgatatcgcaacaaatattatcaacatggcaacagactctccctccgacaggagtgagtttgacaaacttgtaaaacgaacaatccaacaattaaaaaggttaacctcaagatatagactatatcttaccccattcataatcgccgagcttgaatcaagcattcctcgatacaaaaaaaagaaatacttgtgtagattagagaatgcttgccgcggaaactctcagataactgagcgtgaccgagcacttttccctgcttgggtcaaccaacttcccagctgtttcgattatgatgcggtctcacaagaacttggtcaagccatcacagaacagttagaaattacggtttgcccatattgcggcctggagtcaatacaaacatacagctccatatctgtccgaccagacttggaccatttttatccaagaacccgcttcccctttctcgccatatcactttataacctaatccccgcaggctctatttgcaatcaaaaacttaagagaaacaattcaatgttgggacatatgcatcctcacattgaaggcttagataacgatccaatgtttcggtttggcttccttccggacggagatatacgcagcactttctgtctagacatcctccagcaaaatagcaatgccaaaaataataacttaaagcttttcaagataaaagggatatacaatgggaatgaagatcttcgagaatggtactgttgcacttacgagcttcgcgagttccttaaacaagaaggagaggagctgagtaatattgatttcatgtcgccgctttataaaagcgtaatcgacatacgaagacctaatacaaaagtttccgctcaaaaattcaaaatcgaagccctgaatgaactttttcaccaaacgttatgcatcgttgaccagccgatactatgagagggataatttgcacatatttagtagttaacaatacgcattacatactcgaaatcagatacgcgcattaaccataatctccactatattcatttttactgccaagccgatacaatctagaacttgtatcggcttggcttttatattaaaaatataaagtgaacgacggaatagctccccacaattctcctctgttaatatcgacctccccccagtcatctttctcggtgtctaggacagagcaataagtcctagcctaacgaacggtcgcaacgatatagcgcaccaatcgggtggggctgtgtgttcctttacctctcggaccccgtttggcgatcatttgacaacccgcgacataattgcgaggacttcggtctgcaacttccgaaagtcgtccatcatcgcttcaacgtctgtcggcctggcaccttggccgcgcttctctacgagccagagtttcagcagaccggcgacccgtccgaggtcgccgtttaccttagccaaatcggccacggcggtcaggtcaacaacagaccgtattggcgagttcatcccaagggcgcgaaggtagcctgaacgggacattccagcctcgatagcacgctcagtaatcgcctccttttcctcatcagtaacccaaacctcgattggcttgccacgccgccgagcgggtgctttttctttcgtgcctgatggcatgatcgctcctgttgctgctgtgttttcgctctcagacgcggcagcggctgtgggctttgcagagcaaaatccgttgagccgaaggcgaataagggtaggtgttgggagggggcgggcttgcccgtacccgtacaacacacatcttgccgtctgatcttctgcaattctaggcaacttgcccgcctcaggttcgccttgctgccatttccggttatttctgacctataattgccctgaatttctctgagttgcgttaaatttcgctatgaagataaaaaatttactttaattttctaaaatttcctttagttgcctatatcaggtgccgagcagtagttcgatcacataatcaggagacgccaaatgacagacgggccgaaaaaggtgtatcgcggcgcagggcgagttgcctttctggccaggcttgatgactttcgtaagctgatagacgcagggcatccgctacgtgcgatctatgacgattacgccgaacagcttggcattggctacccgcagttcaccaaatacgtctgcaggtatgtacgaaaggaaaaagacgatgggcaccaaaggaaaggctctgggcaattgacatcgcaaagcctctcaccagccccgacaggagtcgtaagaggacagccggagcacagcgccacaccgccttccaaacccggctcaaaacgtgcgggattcgaccacaacccaaatagtggaaacactcgggacgacctgatctgacgctccacgaaacagcgaggccgtgtagcccctttaatctgggagcgaaaatgaggtagaacttttcagtctgtataaatttacctcattaaaaacggtgaacccatggctcgaaaaactctcgcagaacgccgttctgacgccctttcagagctggaaacagctaaagcaagattggcgaaattggataatgaggcggctgaaagaattggaagaattgcaatcaaatcaggattggttaatcttgaaattacagacgatcagattcgggaagaattcgacaatattgtagaaaggatcaggaagggggattgattatgaaaactgctcaccgcatcagcgcattggccaaccaactcaacgaactgcaagcctacctcggtcaagccagcgggcgacctagtaaagccgttagagaagcccaatgcattgcggcagagttggcttcctcgctcgaaaactggcacctagaaacactacacatccctgaaacggagcgtggtcactatcggacccagaccccctattactcagcccactaatgcgctacgccatttcatcaaaagcccacttcggtgggttttttttggccgtaaaaacacatcacgctggaaagacagacaggtccaagcataaagaaaatgccagaaaaattaggttgctacgtgtcaatcccacccaaccatagcccgtaacccattgatttctatgcggatagatacttatccgcatattccaaaccacaccaaatttgtcaataatcaaacctcgaaccatgacaaaacgaggtgttcggcatgaatacggaattgctgaaatcgccgatttcatcggctcggaaatcgagaatacgaactgcccttgttttagcaatgaaaagcacaagtcttagtgtgggcctttacttggccccctcacctgcgtatgccatctactgctcaaactgctcgacgttctatcaacagatgtttgagtacgccgaggcagtcaacacagcgttaaacactgccgagcaactacagacgcagattcagcagtatcagaacatggtcacccagggcacgggcttgccaagcaccatgtttggcagcatcgcggccgaccttaaaaacgtggccaacatttacacccgttcgcagtccctaggccgccagatccaaaatatggactctcagttcaacaccgctttcccaggcttcgagtcctacctgaatcaagcagcgaactcagcaggagttcctgcgcgggatcgatatcagaagtggtcggaacaaggcagcgacaacataaagacggcacttgaggcggcaaacctcaataccagcacgttcgagtctgaagacgtccagcttgatcgcatggtggcccgttcgcagtcagccgtaggccgcatgcaagctatacaggcaggcaacgaaatcgcctcgcagaacgtgcagcaacttcagaaactgcgcgatctgatggccacccaaatcaacatgcagggcaactacattgcccagcaaggcgaccggaaggccgctagcgaagcagttgaacagcagttcgaagcgcgcaaaaacatgcgcggcggcgtgaaggagtactgagagtgactatttcgagatggctcatcgtgttgatgtgcgccgggtccgctttggccggttccctggtcaccgtggtagttcaaagcaacagcaaatttaatgccgtggctgagcaacaacggcagcagcgtgacgctgatgtctcatttgaggcgcgcccgaacactcgcggcggcgtgaaggggtactagcgatggatcgtcgtctgttgttgctcctcgccttggctggtgtgttcgtgggcggagatgctgtggccgcaaccgacctttcccatgccgatacatcgattcagggtctactcgacctcgttttgcaacagtcgcaccagtggtcagggaagctgtatgactatgcgatcagactgttctggctgctggcctcgatccagttcatctggacgttcatgcctctggtcatgaagcaagccgatttcggcgagattgtcggcgagctgctgcgcttcattctggtgatcggtttcttccttgcagtcatgaagtactcggtggaatggtcgacggccattgtcgatagcttccgcgatgcggcggcatcggcgagcggcctcgggcgtgcattagaacccggcgatatgctggcagttgcgctggattttggccgcaccatggtggagggcatttcagtgttttctccagccaagggacttctgatcgctgtatgcgcaatccttgtgttggcatgcttcgccttcatcgctgcattcatgtttgtcacgctcgtagagtcttacgtcatcatcaatgcttccgtgctgttcttcggctttggcggttcgcaatggacgcgggattttgcaattgcgccaatgcgcttcaccgttgcgattggcgccaagctatttgtactaaccctgattgtcggcctgatcgtacagtcggcaaaacagtggttggccgcctacgccaatgacgaagcgtcattgatgacgatggtcggtttggccttagtgtgctgttacctcacgaagacaattcctgacctgatcggtggcatgattagcgggacgtcaatgggcggcggctcggccattggtgggatggctgtggccggtgctgccggggcggcggctgcggcggccaccatcgccacagccggggcggcggctcctgccgctgccctcggtgctgccggtactggtagcgcagccggggccggggcggcgggtgtcggtggactcggcggcggtctggcgggggcgattaactccagctttgccggtgccagctccgcaggtggtgccgcgtcgtctatgggttcagcggcgtcctccggcgtgggtgccagcaccggcggcgcagcggccaagggtgccagttccgcaggcgcgaaggtcggcggcagctctaccaattctcccgggcaggcgtcggccgcgccgtcctctccaagcagcggcctacagcaggccgccaagcaggccggaaagaccgcgcagggcaacgacgacaaagaccagcagacgacacccaaagggggagttgtcagctccggcagcgcactttcccaagcggccgacggtggcgcaaagatgctcggcgtgatggcctcaatggcagtgccaggtatggagaatgcgcacgccttgtctcttggtgcaggatctcccccaccagttcccgacgataccaactcgaccactccagccaatggagcagaatcggccacggaagcttcacacgctgagcctaacgtcatccgtccggcctcggacactaactctgctcccggccgcctcgcctcgctcaaggtgccgggaatgacctcgaacgatcaaccggagaaataaccatgatgggctttctgatgttcgctggattcgtagtattcgcctttacgttcgccatcggcatgtgggcactcggccggtggctacgaagcaaaggttacgggccacagctagataagctggatcggcagtacacggcattgcagcttcgagtaagcccgctggcattgtcggcttcctatcgcatgtttgccggggcgcataccctgaatcgtttgcctctgctgggcagtaagagtagcggcgttctgaaccagcagatgttgatggccatccaagccgcgcaggaagcggagagggaagaaaagcgcggcaagcgctaatcgctgatcgctgagcagccccacactaccccgcctcagtgcggggtttcgctttccacacgcagcggctaagtatgcccaatttggaagaatcaggagacactttcaccagcatcacagatgcggtcaaatgccgggaagctccgccctcagtaatacgcacgtacttgtctcagccctatttattacacctcgctatgggttatacgctgcgttatggtcgatgtttgggacaccggccccctgatcatacatgagcttccgaggcgttttctgaggggttctgacaagcgtaagagatgattcggctaccgcccctttccttcgggtctcaattcaaagaccgcaggaggcacgacgcgccagtctcttgaagatgcataagttcgatgaagcaatcagccctttctttttggtgccaaacgggccgaaggccgactggcaaggccggaccgcgcctcaagcgcgggctgcgccgcgcaggtactgaatatcctgaagatcctgctaaccccgggcggatgtggcacgtttcgggcgggtgtgacgcgttaccgggcgggtgtgacacgccatcgggcgggtatggcacgcttcacctgctaaaagcactgcttttcttgatgcgatcaccatcaagcacaagtccaattatcctcagatcttccgcttcctccttaagccttcgtcgcgcattgcgcatgtcctgacttgaggcttttccggctactgccacgataacggtgtctagataccaaccgcctgtcggcactactttgtggctcaaaacgtgccgagctaccgcttggcttatgccgtgctggaggcgcgcaatgggggccgggtcatagtagagactcagatcatgctcaaggagcattaccagcgcaattccgagacgcacccgccataggtttcgggctccccctgtcagaggatcaggacgtgtcatgggcgaaggtataacgtggtcaatcaatccgccgatgattggaaaatcaaattgcggcgtttcaatcgttatcgttgcggctctcagttcggccagcagcttttcgatctgtgtgaagctgtagcggctatcggaaagtgtctttctcacacgcgcgggatctaccagaagttctacgccaccatctgagacagaccgtcgacgttctgcgcagtacagtacagcttccagtatgtccgcgtgcctctgccctagtctgcctgtcacgcggcagcgcccaaatgatgtttctgcccaattaccctcgcgcagttgcgggcgctggctaggctgataaagcatcactctggcctgtgcgatagaactggtgggaaccacggcgttaccaccgctcatcgtcacttccgtttacgacttgcagcgggctacctttcttcatttccgccaactcaaccggcacaagaacgccgccttcctggcgctggtaccattggtcgagcggggtggcatcgtagttctgcttgctaacaccgaaacgaacaaaaaaacctcttcggtcgttaccgatgggctggcgatcataggcgcgatcgctgagaattttggcctgctcctccgtcatctttgcgacaaagccgcaccagcgggcgttgtcgattagagcggatgcgcctcgtgctgcctgttgctgatcggtttgcccctcgcgggcgctgcccttgctgacatggtgcaggtacaagactgatgccccagtattggtcgcgacgtgctcaagcgtggcgactagccgtgacatgtcgccgttgctgttctcgtctcggtcgtgaattcggcttagggtatccagcactatcaaccgggcaccttcgcaaaactctgtgatacgagcaagatgccgatcatccatgacgttcagtcgtttacccatgatcgactcaagaacgaggttcttcgcgatggactcgcgtgcctgctgatttaagtgctggcctatggcatggatgcggcgcaccaatgcgacttccgggtcttctccggcgaaatacaccactcggccagcgcatgagggggcaagccctacaagatcaccgccggcaacgctgcatgcgatagccatcgccgcttccaacgcccagaagcttttccctgtagctccgggagctaccaatgctcccactgtgccagcgaggaagccgggccatatgaagtccagtgtgggcggttcgttctcgaatgctgcccgtaagtcaatcgccacaactcaagctcccattccgggacgcgtggccgggccggattgcctgcacgtatcaatccatgtctcgacctcttccaaatcccaaacgaccttccggctgctaacggcaatacgacgagggaatttcccctgcttttcgaagttataaatcgtccgctcacacaaggggatcattgccagcaattgctttttgctgatgagcactttgctcgacttcctcgattctttttccacaccgaactcctcgttttgtcgcatttgaggttcgattattgccccatatttccagagcattccacagatatttatggatttattccctttaaaatcagcatcttactgtcctgcaaacgtatagtttcgggacaaaaaaacaacgcgatgtcgttgttctttcacaagtttttttcgtcaaagccgtcaggaaaaatgtgtcccacaaacgggtagtttccggacagaaaaaaacccacaaatgtgggtttcttgatagaacaaaatagatcagcgctcgcttatcccattaccaaaaacgaaatcaactttctgagcgcgtttttttgcgcgtccattcatcaatcatatccgcccaatcttgcaacatcgcccgacgctgatcacggtattcagccttgttgtaaacggcccgtacccccttctgctcgtgcgcaaggcacttctcaatccagtctgagttgtaacctgcctcatgcagcagcgtgctcgctgtgcgcctcaaatcatgcggtccgaacttgctcagcggctgcccttctttctgcgcaagccggtacgtgagcgtcagcacctgattgatcgtcgcggtgctcattggcaaatcagaatcgtaccgggagggaaagacgtagtctgaaccgccagcaaacgtcttcaacgcaatgaagaaatccaaagcctgctgagataagaacaccaaatgaggattacggcgcttcatccgctctttcggaatgatccacaaggcttcgctgaaattgatctcgttccaggtagcgttggtcaactcacttttgcggaccatggtcagcaataacagcttagcggccaccctaacggaggaggcggtgccgatacggtccaggtactgatacatcaacgcgatttcgtcaggccccaaagcacggtcacgtggctcgaatttagcgatgcttgcaggacgaaccagatcagccggattctcgaccttctggccacgctctatcgcccatcggaatacctgcatcacaatctcgcgggagtgaacggccgtggcgggagctccacgctccacaattgcatcagtcagcgttcgcagatcctcatgattaatttccaccagtttctgattaccgaagtgcggctttagctcgcgctcgtaaaccgatcggcgcatgtcacgcgtcgagtcagccatctgatacccacgcagccatttctcagcccacgcatcaaacgtctctgcccctttggtgcgtgccttggcacgggctttctctttggcaggtgacttacccgccgaaaccatctttttagcctcgcccaggcgctctcttgcttccgcaagtgtgatgccacccacgccataacgaccgaacgtgatggtctcctgacggccattgattgagtagttgtaacgaaatgagatggaaccggcagcagtgacggccacgtacagcccgtcacggtcgttcactttgtagagtttttcttgcggcttgaggttacgcagcttggtatcggtcagcatggcagttacggattccatggaaaaaataccatgctcagagaagcactcatacaccgcgataaaacccaatggaaccgggctgatgatgagatttgataccatgcccttccctactagggcgacatggtatcgagcaccgaacatggcatttggctcagtcaatgccccgtaccatgccatacaaacacggtgcttggcgatgcacaaagctgccagaacttgccagacccaaaaagccaaaagcccgcaattacgcgggctccagggcacttcttgctagatggtgccggacaatgccggacgtccaatcattcccactcaatcgtcgccggcggcttgctcgacacgtcatacgtcacgcgcgaaatgccttcgatctcattgatgatacgaccgctgacagtctccagcagctcgtacggcaggtgtgcccagcgggcggtcatgaagtcgatggtttctaccgcacgcagggccacaacccacgcgtagcgacggccatcgcctaccacacccacggatttcaccggctggaacaccacgaacgcctggctgaccttgtggtaccagtcggccttgcgcagttcttcgatgaagatgtggtcggcgcgacgcagcaggtcggcgtattccttcttcacttcaccgaggatgcgcacgcccaggcccgggcccgggaaggggtggcggtagaccatgtcgtacggcaggcccagttccaggcccagacggcggacttcgtccttgaacagttcgcgcagcggttcgaccagcttgaggttcatttcctcaggcaggccacccacgttgtggtgggacttgatcacgtgggccttgccgctcttggcgccggccgactcgatcacgtcggggtagatggtgccctgggcgaggtacttgatgttgtccagtttgttggactgggcatcgaacacgtcgatgaaggtgcggccgatgatcttgcgcttcttctccgggtcggactcgccggccaggttgttcaagaactgatcttcagcgttggcgcggattaccttgacgcccatgttctcggcgaacatggccatcacctgctcaccttcgtgcaggcgcagcaggccgttgtcgacgaacacgcaggtcagttggtcgccgatggctttgtgcaacagggcggcgaccacggaggagtcaacaccgccggacaggccaagcaatacgttgtcggtgccgacctgggcgcgcacctgggcgatggcgtcttcagcgattttcgaaggggtccacagggcttcacactcgcagatgtcgaggatgaagcgcgacaggatgcgcccgccttgcttggtgtgggtcacttccgggtggaactgcacgccatagtaacgacgctcatcgctgaacataccggcgatcgggcagctcggggtgctggccaggatgtggaagtcctgcggcatcttggtgaccttgtcaccgtggctcatccacacgtcgaggccgaacaggccgtcggcgtcgacgtggtcttcgatgccgtccagcaggcggctcttgccgaccacatcgacacgggcataaccgaattcacgcagctcggaaccttcgaccttgccgcccagttgttcggccatggtctgcatgccgtagcagatgccgaagaccggtacgcccaggtcgaacacggcttgcgggcaacgcgggctgttggcttcgtgcacggactcggggccaccggcgaggatgacgcctttcggtgcgaattcgcggatcgcttcgtcgtccatgtcgaacggatgcagttcgcagtacacgccgatttcgcgcacgcggcgggcgatcagctgggtgtactgggaaccgaaatcgaggatcaggatgcggtgggcgtgaatgtcgagggccatgaagtcagtctcgtctaatgaatcagaaacaactcggggctgaagaacagccccggttacttaacattttgctggaagcatcaacctacacggtagtttggcgcttccttggtgatctgcacgtcgtggacatgggattcagccatgccggcgccggtgatccgtacgaactctggcttggtgcgcatttcttcgatgtcggcgctgccggtgtagcccatcgaggaacgcaggccgcccatcagttgatggatgatcgcgctcagggtgcctttgtacggcacgcggccttcgatgccttccggaacgagcttctcggcacctgccgaggagtcctggaagtagcggtcagaagagccttgcgcctgggacatggcgcccagcgaacccatgccacggtaagccttgtaggaacgaccctggaacagttcgatctcgcctggcgcttcttcagtaccggcaaacatcgagcccatcatcacgcaggaagcaccggccacgatggccttggacaggtcaccggagaaacggatgccgccgtcggcgatcaacggtacgccggtgccttcaagggctgcggcgacgttggcgatggcgctgatttgcggcacgccgacaccggcaacgatacgggtggtgcagatcgagcccgggccgataccgaccttgaccgcatccgcgcccgcttcggcgagggccttggcggcagcgccggtggcgatgttgccgccgatcacctgtacgtcagggaagttctgcttgacccaacgcacgcggtcgatcacgcctttggagtgaccgtgggcagtgtcgaccaccaccacgtcaacaccggcagcgaccagggccgaaacgcggtcgccggtgtctttaccggtaccgaccgcagcgcccacgcgcagacgaccttggtcatccttgctggccagcgggtaagccttggctttttcgatgtcgttgacggtcatcatgcctttgagggcgaatttctcgtcgacgatcagcacgcgctcgatgcggtgcttgtgcagcagttcgcgcacatcgttcttgtcggcgccttccttgaccgtgaccagacgctctttaggcgtcatcacttcacggacggtgacttcaagacggttctcgaaacgcacgtcacgggaagtgacgatgccgaccaggtcgccatcgtgcagtaccggaacgccggagatgttgtgcaggcgggtcaggtcgaacaggtcgcgcacggtggcgtcggcttcgatggtgattggatctttcaccacaccggcttcgtaacgcttgaccttgcgcacttcggcagcttgctgctcgatggtcatgttcttgtggatgatgccgatgccgccttcctgggccatggcgatggccagacgggcttcggtgacggtgtccatggcagcggaaaccagaggaatattcagctcgatgccacgggttaggcgggtcttgagactgacttcgttaggaagcacctcggaataaccgggcacgaggagaatgtcgtcgaatgtcagagcttcttggctgatacgcagcatcgcgggggctcccgagcgggaaaatggaagcgcgccattatatacatgcaccctgtcgggctcaatgtaaaactctgacaaacttggtaatactgatagatgggtaatttaactgtcccgatcgttcccacgctccgcgtgggaacgatcggatcaggagggttacaactcgactttgacccaactcatcttctggtccagccaatcggcgaattcgtcgataaaactctgcttgaaccccgcttccgcccagttgttgaagatgaatcccaggttggaaaacccgcattcctgcaggaacaggaacccgttgatgtcgtcttcatgcccacacagcgggcaggtgaagttgtcggtgtggccgggcatccagtcttccaggctttcgaacagcgcttcgccgacttccttgcggcattccgggcaaccggcttcttcgagaaagcccttggccggcgtgtagatgcagcgcttgtagatgatctccaggccattgatcggctcgttgaacggcagtgcctcggggtaaagcaccacggcacgggcgccatcggccagggcgtagcccatgcggttgccggtgcggccacaggtggtcagctcttccttgatgatgttcttgcgcaccagccagcgcacgatcgcccgggcgcggggttcgtggacgggcaaggtggagattttcgggacaaggatgctttgggaattcatgggagtcctgcggtgtggccacttgcccccgaagaggccctgaaggcaggcagcttaatccctgaaaagaacaggtcaagtactcaaataccgcccgatcaatgcaataccgctggtcagcaccagccaggtcaccagccgcacaaacgcctcacgcgacatgcgcatcgtcaacctgcgcccacaccacagccccaacgccatcgccggcaacaggcacagtgccaacatcaacaacggtaaatcagcatacaccccggcgatcaggaacagactgaggcgcaccaccgtgctgcaactgatcaacgcactctgggtggcgcgcgccgcgtctttggacaggcgactgttgaggtagatcgcatataagaagccaccactgccgaacagcgccccgaacaacccacccaccgtgcccatcggtatcgaccaccccgccgccagttgcgtcggccgcgccttcaccgccaggctgtagagcgcgtaggcgctgataaacaggcccatcaacaacagcagcaggtccgaatgcaagttgagcaaaaacaccacgccgagtgtgcagccaaccgccatgcacggcagcaatcgcagcaactccggcttgttcacctcgcgccgcgattgcagcaggttgccaaatgccgcgacaaaatccagcagcaccagcaaagggatgatctttgacagtggcataaacacgatcagaatcggccccgcgaccagcgccgtaccgaagccagcgataccgaacacgatataggccacgacgatgcccaggccgatcaccagccaatccacagcgccaaacgaccactgactcatcagctcaaccgggctcatggggtattccttgtacgagatgatcatcactttagccatcggtgagagatgcgactaatatcttcaaagcccgccacctatctcgaaaaggcatgacgcgtgatatcaacccgccaactgcgttacttcgtcgaaatcgccgactgcggcagcttcagtgccgccgccgaacgcctgtttgtggcgcagtcagccttgagccgacagatcaaggagctggaaacccagctgcaaaccccgctgttcgaacgcaccgcacgccaaccgaggcttacggcggcgggcgaagccttctatccgcgagcccgcaacctgctgagtgaactgctcaaggccagccaaatggcgacacaagtgggcaatggcgaactgggcacgctacgcctgagccattcgagcactgtgccgatgagcggccctttgctgcagggcatcagcgcttggctggaacgctgccctggggtgtcgatggacatcgtcaaactgtcctccgaagcgcagttggaagaaatcgccgaaggtcgccttgaggtcggcgtgctgcgctcgccggtgctgcgccagcgcgagggggttcgggtgatgcctttgtatagcgagcaactgctgctggccgtaccgcccaaccatgcgttagcgcgtagtcaggcgcccatcgagctagggcaattgaaggacgaagcgtttatttcaataccccacccccagcgcggcggcctgagttatctatcagccgagctatgcatgcgtgccggatttttccccaaggccgcgcgcgtgatgtcgcgcaagaccacccagttgcaattgatccaggccggcttcggtattgccttgttaccaaaatccatgcaggacatcgcccccgccaacgtgcactttttacccctggccgacccggactgcctcagcaccgtggccctggcctgcgcacaggcgccgagcgcgctggtggagcaattctgtcaaaccttgcacgaatgcctataaactgccgcccatgattaaagatccttttgctcgtttaggcctggaccgcgaagtcctgactgtcagccagctcaacggccgtgcgcgggtgttgctggaagacgtgttcaccaatatctgggtcgaaggcgagatctccaacctcgcccgcccggcctccgggcatgtgtatttcacgctcaaggacagcggcgcccaggtgcgttgcgcgttgttccgcaacaacgctgcgcgggtgcgccaggcgctgaaggatggcctggcggtgaaagtgcgcggcaaggtctcgctgttcgagggccggggtgattaccaattgatcctcgatacggtggagccggccggtgatggggcgttgcgcctggcgttcgatgcgctgaaggaaaagctcagcgccgaaggcctgttcagtgccgaacgcaaagtgccgctgccggcgcatcctcgacgcatcggcattatcagctcgccgacaggcgcggtgatccgcgacatcatcagtgtgttccgtcgccgtgcgcccaacattgaactgaccctgatccccaccgccgtgcaaggccgcgaagcgatcccgcagattgtgcgcgcgctgaaactcgccgatgcccgtggcttcgatgcgctgatcctggcccgtggcggcggctcgctggaagacctctggtgtttcaacgaagaagccgtggcccgtgcggtggacgcctgcgtcacgccgatcgtcagcgccgtcggccacgagaccgatgtgtcgatcagcgacttcgtggcggacgtgcgcgcccccaccccttccgccgcagccgaattgctcgcgccagacgccagccacctggtgcgccaggttgaaaacctgcaccgccgcctggtgctgctgatgcgcaaccgcctgagccacgaccgcctgcgcctggaaggcatggcccgacgcctgcgtcaccctggtgaacgtctgcgccagcaagcccagcgcctggacgacctggacatgcgcctgcgccgtgccttcgagcgcagcctcaatacccgccgtgaacgcctgatccgcctggaaacgcgccttgccggccagcacccgggccgccagttggccctgttgcgccaacgcctggacagtctcgccgaacgcctgccccgcgccatgcgcgaaggcctcaaggcacggcgcctgcaactgcaaagccagatgcagacgctgcacgtggtcagcccgctggcgaccctgggtcgtggctacagcatcctcttggatgaacgcggccaggccattcgcaatgccgcgcagacccacaccggccagcgcctgaccgcgcgcctcggtgagggccaattgcaggtgcgggtggaagacaaccacctgacacccgtcaccctttcgttattggattgattgatgccacgtctctttagtgtgttgatgctgctgtgccttgcctttaacgcacaggccgacagctacattacccgaaccctcaacaagcccgtgcctggcggggttgccgtggtcgaacttggcccttccgctgccgcacccaaagccacgtacctgggcaagccggtactggtggtgaaagaagcggacacctggctggcgattgtcggtattccgttgacggtcaagcctggcaatgagcgcatcagcagcggcggacgcaacctgccgtttatcgtcggctacaaaaagtacccggaacaacgcatcaccctgaaaaacaaaagccaggtaaaccctgacccggcgcagctcaaacgcatcgaaggcgaattggcggtgcagctcaaggcctaccgcagtttcagccctaacctgccgagcaacctggtgctggacaaaccggtgaacgggccgctgtcgagcaagttcggtgtgcggcgcttcttcaacggtgaagaacgcaatcctcattcgggcctggactttgcggtgccggccggtacgccgatcaagacgccagccaacggcaaggtgatcctggtgggcaactacttcttcaacggcaacacggtgttcgtcgaccacggccagggctttatcagcatgttctgccacatgtcgaaaatcgatgtaaaagtgggcgatcaactcacgcgcggcgcggtggtgggcaaggtcggttcgactggccgtgcgaccgggccacatatgcattggaatatcagcctgaatgatgcgcgcgttgatccagcgatctttatcggcgcatttcaaccctgaaccccgggcatcggccggcaccattcggtgccgtcgccggagcttttcttaccgatgcaacaggaaccaaaccatgctgaacacccacccattcgacgacttacaaggagcgtaaacgacactcaacctaccctgtgagacactccctatgtttgctaccgcgcaagcccttatgtcagttgcttctcggcagaccaccacgctacgtcagaccactccgcccgcaaccgacaaccgcccacctacttccagctctcccactgcccacctgaccttcgcgccagacttcccccccctccccagctcatcaggcatccccccagccacacctagcccacttgcaaagcactttaacgtcagtgaccagcaggcctttctggatcaacacgacagcctcaccctcgagatgcaacgcctacacaatcagcaacccaccttcaaggcattcctgcaaagcgaactggaaaaagcgtttccagacgtcaggccgctcaacgccgaaacgctctcgttcaaccgttaccgcagagacggcgatcacgaaacactggcctcttccgagcccttgatgaccgccctcgcccgaatgatgcaagagatccaggccaatccgaatcggctgagatcggctgagcgcaacatccgcacggagttcattacccaacaaactgccaatgacagtgccacgccagccattacctcaggctccttgcaatccatcgccagagcgatcgtcacgcagtaccccgcaacgctgcaggcattctggacgacacctcgcccaggcacgacacccccgcagacgccccaggaccacctgctggccttgcacaaacaacaactatcgaccctcgccgcactgcgcgcagcagacggcacgctaagcccggccagcaagacgctgatcgacaacgcactgcaataccccaccctggccgagcgggaaaaagccttcgccgatggcgcgcgcccaggtgtgtatccgctcactctcgacgacggcaccgagcgcggcgcactgctggcgggcacctttctgatcacacagaccgatgggtcctttgcctcaccacccacctggcccaaaggaaaatccttggcgctcaacgacgcccatggcccggtcgtgctgtacaccccaggcgacggtttcgaggagtttgccacgccggcccaggcgcgccaggccttggcaaaacggcttgacgagggaggcgtcaacgccgacctgctgctgcaaaccctgcccctatcgttgcaaaaccgccccgaaccgcccaacggggaagacctgatgctcagcgtcgcaccgctggatggcgatgtactggccgaaggcgtcccctggatgctcaagcgccagcaggcagaagtcgaagcgaaccagctcaaagccccgctgtcagccacggccatcgatgacgctgccgactggtcgtatctgctcgaaggcaccaatgccttgcaggcacgtaatcaagcattggcggataagctgcaacccgagtggctgaaaaacctgagccccgcccaagaagccctcttcgcccatctggagcaagcgcaagaaaaaagcgccgatgcgctggtgccgctgcttgaaactattccggccctgcccactttcgctcgtgatcggatgaacgaagcgattaaaaagcagtacccgaatgccgaggtgaatgccgatcaactgatggttcaggtccgcaccaggactcacgtcaacaacggtcgaaaaaccagcagccatacgcctttcgaaaaaaacaaacaggtatcgctcaccgacctggccctgaaaaaccccaccgagttccccgccggtgaaacggccacgttcacccaaaccaccttcaaactgcctctgagcgacaaacagggcaaaccggtgctcgacgccgatggcaagcctgttgtactggacaccgaccaactcaagcccctggtcaacgccgccgatgtcgggggtgaatacaccgctctgctgaaaaaagaactggccacagacgccgtggcgggcctggcaggacagcggcgtgacgcatggaaagccagccaggctgacctgatggccaaagaggcatttctcgcagaactcaaccccgatgcctataaagccgaagccaaggaggacaagaccagcaagcgcggggcgcaatgggtcgcggccgtactggatcaccccgacccggccaaccgcccgcaagtcgatggcgaaaccatcgagacccacgccctcgtccaacgtggcctgccggttcaaggcgtgatggtgatcggcaacagtaaagatgcggagcgggtgctatacacgccgaatgcacccgacggcatcacgtttcgcgaagtcgccagccaacaggcactcaacaccctgctggaaaaaaacgagtggaagctgtacaccgcgaaccgcaagtcgccggtcagcaaagatgacgtcgcccaagcgaaacagaccctcgacaaacacaagttagatatggcgaggaaccccgccgcagccatcgagaccttcgtcaaagccctcaaactgacaggcgacacatccaccctcacccccatgaccggcaacagcctggatgcgctgtacaagcaacatgtccaattgctgaccgacagggccgaccaccaatccgtcagtagcgctgaagtggcaacgcagtcaagggccaacaaagcgcaattcggtgtggatgtggcgctgatcttcctcgatctgttgcccgtcgtgggcaaaggcgcctcgatgggcgtacttctgggtaaagccggggtgacggcgctgcgtgccaacgccagagtcttgcccaaactgatcaggaacccggcacttggccgggcaatttatgctgactttgccacggcaggggcaggtatgcccgtggttcggacctcgccgctgcgcccggttgccaaggcgcccttgcgcgccattgagcccgcaccgcgcccaacacccagggcgctaccggcgcccgacggcccgccaccggccacgccatcgaccagtagaggtattgtcgcccgaatcgaacagcccaccatcacgaatgtaaaccgtgacctgagcgcctatgccgtgccgaatgacgtgatacagggcgccgtattaggcccaggcagtacttatagggtgggcgacgacttttacgtgcgcttcacggacggcacgggagagcaaagggtttaccagatagagtcgaactttcatgcccgggatggacaggtcactgtcgtcaatccccatttgccgcccacgacaaacaggtcaaacagggccgtggcgtttctagtgtccacaggaaatggcgagtggcaaatcaacaatctggtcggggccgggcgtcatcggggcagacatttgccacccgaagacgtcacctacatggaccggatactctccggcagagcagcctatgatattgatgggagcgcagttactaccgggcaagtcagacgctggttccggcgcgatatgaatagtttctacgacgccctggcaacaggcggcatgccgacacgacctacgctacccgtgatggcgatcaacagtacaccggattcggccatacaaaacagcctgacccaaaacggtgtacgggggcttgtgctgggtgaaatgcatgatgagcctgcggcgtatcagttggtcattgatcagatgcagaacttcaaaaataacggcgtcaccactctgtacgttgagggcgcgccattcctgcagggttctcccaacatttccgacgcagcgctgcgcacctccgatgcggcctactttggccagcatccttacaacttggactacaagagcggccctacgcttacggatatcatcaaagaagcagacaaacatgggataaaagtcgtcgggctagagcaccagcaattgacatggcgtaccgacgatcccatgcatatgtacaaacatgcgctgggccagcagaaccgtcttagagaattcaactatcatgctgcaaaaatcatcgaacgcaccccgcccggcgaaaagttcgtggccatcgtcgggaaatttcatatgaataccgaactgggcgtcccaggcatcgctgaattgaccaacggtatcggcctgtctgtaacgccttcgctaaaaggcagctcaagcctggtcagccagccaccgcacacaccgccaccgtcactgaagttgcagcgcggtaccaacgtccctgagccatacggcgatattcatgtcgattacaacgtggatgcgttgacgaactagacacgccctataaacctcggtcacgccgcctcaacgcggcgtgattattaattgcgcaccagcaaaaacaagcagcaatcaatcactaacaattctcaaaaaacaaatcattaatttcgaaaaatcatcaaaaaacgaaaattatctcaatttttttttgcaacttgccatcccattcgctggcggttagggttgagcccatgaaaacctctcacaccctcattcagctccgccagcaccgcagcctgtgcctcgtcagcgcacgactgccaggctgaatcgatctgcctcgtctttacgttttatccccaaaaacagttccacggcaggccgccttttctcggcccctacaacaaaggatttcccgatgagcatgctcaaagacccgtcttcgaagtaccgcgcgtttccgaccatcgatatcccgaaccgcacctggccatcgaagaccatcaccgaagcgccgatctggtgcagctccgacctgcgtgatggcaaccagtcgctgatcgagccgatggacgcggtgaaaaagctgcgcttctggaagaccctggtcgccgtcggcgtgaaggaaatcgaagcttcgttcccggccgcctcgcaaaccgacttcgacttcgtgcgcaccctgatcgaagacggccacatccccgaggacaccaccatccaggtgctgacccagggccgtgaagacttgatcgcacgcaccttcgaatccctgcgcggcgccaagaaagccatcgtgcacctgtacaacgccacgtcgccgtccttccgccgcatcgtgttcaaccaggacaaggaaggcatcaaggccatcgcggtcaacgctgccaagttgttcgtcaaatacgccgcccagcagccggaaacccagtggaccttcgaatactccccggagaccttcagcgctactgagctggagtttgccaaggaggtgtgtgacgcggtgatcgaggtgtggaacccgacgcccgagcacaagatgatcctcaacctgccggccaccgtggaatgcgccacgccgaacatctatgccgaccagatcgaatggttcggtcgccatatcaatcgccgtgacagcgtgatcatcagcctgcacacccacaacgaccgtggcaccggcgtggccgccaccgagctgggcctgatggccggcgccgaccgcgtcgaaggctgcctgttcggcaacggcgagcgcaccggcaacgtcgacctggtcaccgtggcactgaacatgtacacccagggcctcgacccacagctggatttctccgacatcgatggcgtgcgcaaagtcgtcgaagagtgcaaccagatccaggttcacccgcgtcacccgtacgtgggtgacctggtgcacaccgcgttctccggttcgcaccaggatgcaatccgcaagggtttcgcccagcagaaagacgatgcgctgtgggaagtgccgtacttgccgatcgacccggccgatattggtcgcagctacgaggcggtgattcgcgtgaacagccagtcgggcaaaggcggcatcgcctacctgctggagcaggaatacgacatcagcttgccacgtcgcatgcagatcgagttcagccaggtggtacaggccgaaaccgaccgcgtcggcctggagatgactgcaccgcagatctatgccttgctgcagcgtgaatacctgcaagccaacaccccgtacgcgttggtcagccatcgcctgcaggaagagaacggcaacagctttgtcgaggtggaagtcgcgggcaagggccagggcgaaaccaacctgcactggaaaggcaaaggcaacggcgccctggaagcgttggtggccggcttgccgattggcgtggagatcatggactacaacgaacatgcgatcggtgcgggcaccaacgccaaggcggcggcctacatcgaactgcgtgtgaacggcgagcgaccggtgcatggtgtggggattgatgaaaacatcaccacagcgagcttcaaggcgctgttcagtgcgctgaaccgttcgttgagccagcaggaagcaaaagcagcgtaagcagtctgcttaaaatgtgaaaggcccctggatatgagtcctggggccttttttttggttttttgtggtctgtgagggcctcatcgggggcaagccccctcccacattttgaatgtattcacaaattaaagtgtgggagggggcttgcccccgatagcggtctgtcagacaaactggaaagtatcggcatccaggttggctggaaacctggtgcgatacgcggccaattccgccgcatccaggctcacctggaacactccatccgcctcccccgcactcagcagcgtctcgccctggaagtccaacacctggctatccccggtgtaggcaaagcccttcccatccgtgcccacccgatttaccgccgccacataacacaggttctcgatggcccgcgccggcagcagtcggttccagtgcgagcgccgcgcccccggccagttggcggtgtacagcagcaggtcggtgtcctgggcatcacggctccacaccgggaaacgcaggtcgtagcaaatcaacgggcgaatacgccaacctttcacttcgaactgcacctggcgctcaccgggggtgtagtggttgtgctcgccggccatgcggaacaggtggcgcttgtcgtaatgcaacacctcgccatccggccgtgcccacagcaggcggttgcggtggctgccgtcggcagcctggatgatcacgctaccggtgatgacggcgttgtacttcgcggcctgtgcctgtagccaacggtgggtcgggccgttctcgggttcggccagggttgctgactccatggaaaaaccggtggtgaacatctccggcaacacgatcagatcagcgcctttcgcctgctccaacaataacccgaagtgctcaaggttggcttggcggtcgtgccaggccaggctggtctggaccagggcgatgttcaggttcggcagagcactcagatcgcgcatagtttttcagccgcttgttgcagcgtttcctcacgtttggcaaagcaaaggcgcaccaggcgctggccttggggtggggtctggtagaacaccgagaccggaatcgtcgccacgccgtgttcgcgggtcatccatagcgacatggcgacgtcatccaggtccgggcggatctgtgagtaatccaccagttggaagtaggtgccggtcactggggtaaagctgaagcgcgatggcgccagcaggtcgcagaacagatcgcgcttggcctgatagaacgccggcaactcatcgacatgctccgggtgctcagccatgaaatcggccagcgcgtactgcaatggggttacgccacagaaattgacgtattgatgcaccttgcgcagttcgccggtgagggccggcggggcgacgacgtagccggttttccagccggtgacgtggtaggtcttgccgaaagagctgaccacgaaggcgcgctggtagagttcttcgtgggccaacacgctgacatgggccacgccgtcgaacaccaggtgttcgtagacctcatcgctgaccaggtagatgtcacgctcgcgaatcagttcggccaactggtccagttcggcgcggctgatcagcgcgccagtcgggttatgtggggagttgaggatgatcatgcgcgtacgcggtgacagggccgccttgatcttctcgaagtccagcgcaaagccatccaggcgcagttgcacatgcacgcagcgaccacccgccagctccaccgacggctcgtagctgtcgtagctggggtcgaacacgatgacttcatcaccgttgcgaatcaccgcctggatcgcgcagaagatcgcctcggtggcgcctggagtgatggtcacttcagtgtcggcattgactgtggcgccatagctgcgggcgatcttggcggccacctgctggcgcagcaccggtaagccggtcatgggcgcgtattggttatgcccgagggcgatatgcttgcccactgcgtcgagcaaaccctgggggccattgaagtccgggaagccctgggacaggttcagcgccccggtctcggcagcgagttgcgacatggtggtaaaaatggtcgtgccgacattcggcagcttgctggtgatcatgggagcccccttcggctgagctgcaagttttaagctgcaagccataagcaggtcaaggggcaaaccgccaggcacaaaaaagggctccaaaggagccctctcttgcagctaacaacttgaagctacgattacttcttatcgcggcgcttcttgtcggccttcttatggtgagtcatcaaacgacgcttcttgttcacctgacggtcagtcagtgtgttcttgttgccttcgtatgggttctcaccacccttgaactcgatacggatcggcgtaccgaccagtttcaagacacgccggtaggtgttttccaggtaacgcacgtaggacttgggcaccttctcgatctggttaccgtggatcacgataatcggtgggttggcaccgcccaagtgggcgtaacgcagtttgatccggcggttgttgaccatcggcggcgcgtgctcgccaaccgcgtcttccaagatctgggtgagacggttggtcggccagcgggtgaccgcggacttgaacgagttctgtacggaagcgtagaggttgcccacgccggtgccgtgcagtgccgagataaagtggatatcggcaaactcgacgaagaacaggcggcgttgcagctcgatcttgacgaaatcgcgctcgctcggcgtcatgccgtcccacttgttgatcgcgatcaccagcgcacgtccggcctccagggcaaagcccagcaggttgaggtcgtggtccaccacgccttcgcgggcgtccatcacgaagatcaccacgttggcgtctttgatcgcctgcaaggttttcaccaccgagaacttttcaacttcctcgtggatcttgccgcgcttgcgcacaccggcggtgtcgatcagcgtgtacttttcctcgttacgttcgaacgggatgtagatgctgtcgcgggtggtgccgggctggtcatagacgatgactcggtcttcaccgagcatgcggttgaccagggtcgacttgccgacgttaggacgaccgatgatagcgatcttgataccgtctttttcgctcgggccaggaatgcgcttggcttcctcaccttcggcgacgatttcctcttcgccctcttcttcctcgacgtcatccttggggaaatcgcgcagggcaatttccagcatctgggtgataccgcgaccgtgcgccccggcgaccgggatcgcatcgcccaggcccatcgggctgaattcggctcgggcagcttcaggatcgatgttgtcgatcttgttcgcgaccagataggaacgcttgttgcgcttgcgcaggtgctcgccaatcatctggtcggcagcggtgtagcccgcacgggcgtccaccaggaacaacacgacatcggcttcttcaatggccagcaacgactgctcggccatcttttcgtccatgccatgctcgtcaccggagataccaccggtgtcgacgataatgtaggagcgcccttgccactttgcctcaccgtattggcgatcacgggtcagaccggacaagtcgccgacgatagcgtcgcgagtcctggtcaggcggttgaacaaggtggacttgccgacgttaggtcggcccaccagggcgattacgggaaccatgcggctctccacttcgttatttcagaaaatacaaaagccgctgcaaggcagcggctggtgctcggggcagcataatcaaatgccgcatgccccgccgaagcggggccgcctgggtgttaccccaagcatagttcttacttgatggtcagggcttccagcttgccgctgttgccaaacacataaagcatgttacccaccaccagcggacgcgcacgcaggccgtcgctgtcgatacgctcgcgaccgacgaaacgaccatccacctggctcagcaggtgcaggtagccttcgaagtcaccgaccgccacatagctggagaagacttccggtgccgacaactggcggcgcgccagggagtcgttgctccacagtgccgtggtggaacgctcgtcgacactttcgacagtgccggacgccaggctgacatagacgctgccaaacccttgggcgacaccggcgtagctggaagcatcacgctgccagttgacgcggccgctctgcaggtccagtgccgcaacacggccctggtaagtggcgacgtagatggtttcacccgacaacagcaagccaccgtcaatgtccactacgcggtccagctcggaacgaccttgcgggatggccacacgggtttcccaggccggcacgccgttctgggtatccaaggcgaccactttaccggtcgacaggcctgcaacggccagattgttggtcacaatcggaccactggtaccgcgcagcgtcagcaccgcaggcgtgctgtcgtacaaccaacgctgtgcgccggtgctggcgtcgaggccgatcacacggtcgtcctgggtttgcaccacgacgatatcgccgttggtggcaggcggtgcgagcacttcactggtcacgcgagcgcgccatttctcttcgccggtgctggaatccaacgccacgacttcgcccttgagcgtgccgagcaagaccatgccgtaacccacgcctactgcgccggataccggaatttcgaggtctttcttccacttcacgtcgccgttcatgcgatccatggagatcactacgccggtcacgtcagcagcgacaatgttgtcaccgtcgatagccggtaccagcatgttgtaggtttcgccctggccgtcaccgatggagcggctccactgcttttgcaggaccacttcttccttgaagctggtcagctccgcaggcggcagttctttcttactgttgctgctgcaacccgcggccagaacggccagagccagcaatgctgcatgtttccaacggatcacgtcacgcatcccctttggccaagtcgtccagcttgatttgtaagccaccgaccgccgcttcatcagacagcgccgccttggctttcttgtacgcagcattggcttcgtcggtacgacccaattggaccaacaggtcgcccttgagctcttcgcgagtggctacaaatgccttgtcagcatcgccgtcgagcagtttgagtgcttcgtcagccttgttctgtgccgccagtacctgcgccaggcgctgacgtgcgatttcacccagggtcgggttggtcggcttgtcggcgatggccttcagctcagcggcagcgtcgtccagcttgccggtgtcgaccgcgactttcgcgacgaacaggctgccgtattgggcgtaggtgctaccgccgaattcgttcttcagcttgccggccaggtctgcaacctgcgcagggtcgggcttgccgtccggcgtcagggtggtttccaacaattgctgatagaggatcgaggcgccttgggactggttggcctgatacttggtccaggcttgccagccgaagacaaccactaaagccagcagaccgccagtaaccagaggcttgccgttgcgctgccaccagtccttgaactcggccagttgctcatcatcagtactcgacaccccaatactccttaatcgctaaattcggctgttcgacagcttcaaccctgcacgacgcaggtggccaagtgcgcagcgagcgcatcaaaggcaatgttctgttgctcaccctggccacgcaggggtttgaaacctatcacttgctgggccagttcgtcttcgccgaggatcagtgcatacaacgcaccgctcttgtcggccttcttgaactggctcttgaagctgccggcgcccgcattgacttgcaggcgcagattgggcagttggtcgcgaaccttttcgctcagggccagggctgccagttcggcggcctcgccaaaggcgcacaggtacacgtccacctgacgggagatctcttccgggacctgctcaagggtttccagcagcaggatcagccgctcgatgcccatggcgaagcccacaccggtggtcggcttgccgcccatctgctctaccaggccgtcgtagcggccaccagcacacacggtgccctgggcgccgagtttgtcggtgacccactcgaatacggtcttgctgtaataatcgaggccgcgcaccagcttggtgttgatcacgaacgggataccggccgcatccagccgagccttgaggccctcgaagtggatacgagactcgtcgtccaggtagtcggccattttcggcgcattgaccagcacggcctgggtatcggcgttcttggtatcgaggacgcgcaatgggttggtcttcagacggcgctggctgtcttcgtccaacttgtccaggtgggcggacaggtactcgaccagggccactttgtagcggccgcgggattcactggtgcccaggctgttgagttcaagcttgaccgcgtcgcggatacccagcaggccccacaggcgccaggtcagcacgatcagctcggcgtcgatatccggaccgtcaaggttgaacacctccaggccgatctggtgaaactggcgatagcggcctttttgcgggcgctcgtgacggaacatcgggccgatgtaccacagcttctgtggctggccaccaccggtgaggccatgttcgagcacagcgcgcacgcacgcggcagtaccttccggacgcagggtcagggagtcgccgttacggtcttcaaaggtgtacatctctttttcgacgatgtcggtcacttcaccgatggagcgcttgaacagctcggtgaactcaacgatcggcatgcggatctgcttgtaaccgtagttatccagcaggcgcgcaacagtgctctcgaagtagcgccacagcggcgtctgctccgggaggatgtcgttcatgccacgaatggcttgcagagacttgctcacatcaaatccttaaattcgttcttagccgcgcgcgatcagcgctgcgtcagccgcgaccttttcggccgctttctcgcggatcagtctttcgagatgatccaccagattgtcattcgtcaacttctgcgacggtttgccgtcgatgtagatcaggttcggtgtaccgccggtcaaaccgatgtgcgcctctttggcttctcccggcccgttgaccacacaaccaattaccgcgacatccagcggcaccagcaggtcttcgaggcgcccttccagctcgttcatggttttcaccacgtcgaagttctgccgcgagcagctcggacaggcaatgaaattgatgcctcgggaacgcaaatgcagggatttgaggatgtcgtaaccgaccttcacttcctctaccgggtctgccgccagggagatgcggatagtatcgccaatcccttcggcgagcagcataccgagacccaccgcagatttcactgtgcctgaacgtaaaccgcctgcttcagtgatacccaggtgcaacggctgtacgatttccttggccagcaggcggtaggcttctaccgccatgaacacgtcggaggcctttacgctgaccttgaagtcctggaaattcaggcgttcaaggtgctcaacgtggcgcagcgccgattcgaccagcgccgccggggtcggctcgccgtatttcttttgcaggtctttttccagggagccggcgttgacgccgatacggatcggaataccacggtcgcgagcagcatccaccacggcacgcacacggtcttcgcgaccaatgttgcccgggttgatacgcaggcagtccacacccagctcggcgacgcgcaatgcgatcttgtagtcgaagtgaatgtcggcaaccaacggcaccttgaccagttgcttgatgcgaccaaaggcctcggcagcgtccatgtccggtacggagacgcgcacgatgtccacgccagcggcttccagacggttgatctgggcaacggtggcggccacgtcattggtgtcgctgttggtcatgctctgtacggcgatgggggcatcgccacccaccggcaccgagccgacccagattttgcgcgatacgcgacgtttgattggagattcgccgtgcatgactattgtcccaacttcaggcgagcggtctcgccggtggtgaacggcgctacgtctacaggctggccgttgtaggccacttgcgcgccacgggcaaagcccagacgcagcgtcaaaggaggcttgccgccttggtcgagcgtatctcccttacgcttgagaccgctaaacagcactttgccattgccgtcggtgacttgcgtccagcagtcggcgacgaaggtaatctgtacgcggccatcaccggcgatcaacgctggggtggtaggtggcgaaatcgcaggagctgccggagcggttggcgctggagtcgctggcgcctgcactggagcggccggtgtatgggctatggcccccgaagcagccggcgtcgcgggaaccgttgcggcagcggtcgcggcaggcgcggtttccggtgctggcagctcagtagcggcggatgcttcaggcgcggcctggccttgggcgacagcctggtcttccggctcgtccagcggatgaatctgggtagtgccgtcggcgctttcgacttcgacgtgctccatggcgttgctggtcaggtccttggtgcgctgggaggtctggtcttgccaccagacaaaaccgccaccaatgacagcgatcagcagcaacaggctgacaattcgcaaaatcgtgtgggaaacccgcaccggttcttcgatgcgacccaagccatgcacattgctaccttgggagtcggtgccggtaaactggtcgaactcctggactagaacagtctggtcgatccccagcagcttggcataggcacggatatagccgcgggcgaaggtatgcccaggcaacttatcgaacgcgccagcttccaggttgcccagggatgtactggtcaaattgagcttgagggccacttccgccagcgaccaaccattgctttcgcgggcctgacgcaaggtgtcgcctgggtttacgcgattagctgctacaacttccgggtgcgccgctttcatcattgctccgacaggtattgctgatattccggcgtaccgggatagagtcgttcgagttgctggccaaaacgtgcagccgtgtcgcgttcttcatgaaccgtcgccagccgcacaccgagcaatagactacgtgcattttgcccgctgagcaggctaaaacgctcgtaatagtcacgtgccggcacataatgcctgtcatcaaaggatatctcagccatttcgagcaatgcccgaggctggcgaccattcaagtgcagggctttttccagttgccggcgggcattgtcgcgctggccgaggcggatcgaggtgaccccgaggttctcgaacacccgcgaacgctcaggatagagggtatcggcgctggcctgctggaaataaagagcggcctggtcataacgcttctgcgcaaacaggaaactgccgtagttgttcagcagccgcgggtcggcagggcgtgcggccagggccttgtggaaataccggtccgccagttcaggctcggcctgggcctggaacaccagggccagtgcggcattggcgtcggcatcgtcgctgtccagctcaagcgccttcttcaacggcaccttggcctgctcgttcatcccttgctgaaggtaacccaagcccagttgcacataggcaactcgcgcctcatcacggcctttaccggtttgcatagggctgtcatggcccgatgaaacacaaccagccgacaggccggtaacaagcagaagcagcgcaaggcgcaagggcatagagatcctctctcagattcgattcacagcgatcagcggtaaatcgtcggcggcgttcacttcacgtccggcgatataacgctcgctgcggcgggtgcggtccatcacctgcccgaccaattggccacaggcggcgtcaatgtcttcaccacgggtggtgcggacggtgacgttgtagccagcctggtgcagttgatcctggaaacggcggatggcgttgttgctcggtcgctcgtagccagaatgtggaaacgggttaaacggaatcaggttgatcttgcacggggtgttcttgagcaactcgatcatctcgaccgcgtgctcgaccttgtcattgatgtctttgagcaaggtgtactcgatggtcagcacgcgcttttcacccagggacgacatgtagcgctggcaagattcgagcagcatcttaagcggatacttcttgttgattggcaccaattggttacgcaatgcgtcattgggtgcgtgcagcgacaacgccagggagacgtcgatgtgcttggacagctcatcgatcatcggcaccacgccggaggtggacagggtcacacggcgcttggagatgccgtagcccaggtcgtccatcatcaggtgcatggccgaaaccacattgtcgaagttcagcagcggctcacccatgcccatcatcaccacgttggtgatggcacggtcgacggtcgccgggacgctgccaaaggatttgttggcaatccacacctggccgattacttcggcggcggtgaggttgctgttgaagccttgcttgccggtggagcagaaactgcagtccagggcacagcctgcctgggacgaaacgcacaaggtgccgcgtttgccctggggaatgtacacagtctcgacacagctgccggacgccacgcgcaccacccacttacgggtgccatcgctggagatgtcctcgctgaccacttcgggaccacgtacttcagcaatggccttgagcttgtcgcgcagggccttgctgacgttcgtcatggcgtcgaaatcatcgacgccaaagtggtgaatccatttcattacctgaccggcacggaaacgcttctccccgattgagtcgaagaatttctccatttccggctgggtcagccccagcaggttggtttttacagtcgatgtcgtcatggattcaccctcactctttaagccgatgcttagcgagcggttacttcagtagcggcgaagaagtacgagatttcgcgagcagcagcagcttcggagtccgaaccgtgtacagcgttggcgtcgatggactcggcgaagtcagcacggatggtgccggcagcggcttctttagggttggtagcgcccatcagctcacggttcagagcgatagcgttttcgccttccagaacctggacaacaacaggaccggagatcatgaaggcaaccaggtcgccgaagaagccacgagcgctgtgctcagcgtagaagccttcagcttcagccttggacagttgcttgagtttcgaagctacaaccttcaggccggctttttcgaaacgagtggtgatctcgccgatgacgttttttgcaacagcgtcaggcttgatgatggagaaagtacgttgaacagccatggtgtaactccagaaacggtaatttacgaaaaattaaacccgcgaattatacgcgggttattgggtattgcctaactgcgtaagggaggcgtcagtcctgttcttctttccaggcagtctggatagcctccaggaccttttcaccaccgcgatcacgctcatcttcgaaccctggcaacgccatgaccatgtcacgcaaagctacaaagttcagggagtaaggatccagatccgggttggcatctgccaacaggatagcgatctcttgcacatcaacccatttaagactcatgacacttccttgaatcaatgcggcgcttcggcagcatggttgagggaatacttcggaatttcgacagtgatgtcttccgtgccgacctttgcctgacagcttaggcgagaagtcgcttccaggccccaggcacgatcaagaaagtcctcttccagctcgtctgcttcttccagagtgttgaaaccctcgcggatgatgcaatgacaggtggtgcaggcgcagacaccgccgcaggcactttcgatctcgatgtggttgtcatgggcaacttcgaggatggacttgccggtctcagcctccacgaccataccgtccgggcaatgctcggcgtgtggcagaaaaatgacctgcggcattaattattcctcgatttcattcaggttgcgcccggccagtgcggctttcaccgtctgatccatgcggcgggcggcaaaggcatccgtcacttgcgacaggcgcttggtctgttgctcgatggcataaccgtcgttgcctttcatcagttcggccagttcctgcatctgcaggtcgatgaccatgcgctcttcggcatccagcaggcgctcgccgtcggcatccagcgcgccctgcaccgcttcgagcaggcgctgggcgtcgacttgctgctcacgcaatacacgggcgaccttgtcgtcaccggcatattggaacgagtccttgagcatcttggcgatttcaccgtcggtgaggccgtaggacggcttgacctggatgctggcttccacacccgaacccaactcgcgcgcggcgacgttgagcaggccatcggcgtcgacctgaaaggtcacgcgaatctttgctgcgcccgcgaccatggccgggataccgcgcaattcaaagcgcgccagggagcggcagtcgctgatcagctcgcgttcaccttgcagcacatggatcatcatggccgtctggccatctttgtaagtggtgaagtcctgggcgcgggcgacggggatggtggtgttgcgtggaatcaccttctccatcaggccccccatggtttccaggcccagggacagcgggataacgtcgagcagcagcaattcgccaccatcacgcttgttgccggccagggtatcagcctggatcgcggcgccgatggcgaccacctgatccgggtcgatttcagtcagcggctggcggccaaaagcttcggcgacggcttcacgcacgcgtggtacgcgggtggacccaccgaccatgaccacggcaccgacttcttccagctcgataccggaatcgcgcaccgcgcggcggcaggctttcaggctgcgggcaaccattggctcgatcaacgcatcgaaagcttcgcgggtcagttgggccgaccaggtgccgtaggaaacttcaacgcttgcagcattggtcagcgcttctttggccgcgcaggcggtttgcagcaggttgcgctgcgcgcccgggtccagatcggcagacaagccggcgctggtgatgatccagcccgcaatggcgtggtcgaagtcatcgccgcccagggcgctgtcgccgccggtggcgagcacttcgaagacgccgccggtcaggcgcaggatcgaaatatcaaaggtaccgccgcccaagtcgtaaatagcgacgaggccttctgcatgctggtccaggccataggccacggccgctgcggtcggctcgttgagcaggcgcaatacgttcagaccggcgagtttcgccgcgtccttggtggcctgacgctgagcgtcatcgaaataagccggaacggtgattacggcaccgaccagttcgccgcccagggttttctccgcgcgctggcgcagcaccttgaggatatcggccgacacttccaccgggcttttcgggccttggacagtgtcgatgaacggcatatgggattcgccgccaacaaagcggtacggcagctggtcgcccaattgcttgacgtcggacagaccacgacccatcaagcgcttgaccgacagtacggtattcaaagggtcggaagacgccgccagcttggccaactcaccgacttcgatgcggtcggcgtggtagcgaacggcagacggcagaatcacctggccatcagcgtccggcagcggctcggacaagccgctgcgcaaggcagcaaccagggaattggtggtgcccaggtcaatcccgaccgccaggcgacgctggtgcggttgagggctttggccgggttcggcgatttgcagtagggccatggtaatcaggtcttatctgtctatcaggcgtgcatcacgggcagcacactgggttaatcgtcgaggcgctcttctagctggcgcacttcgtaggtgagcttgtcgaggaactgcatgcgccgcatcaggcgttcggcctgctcacgttgcgctgcatcatcccaacaggctgcgaagctttcgttgagctcatcctgggcggttttcagacgacgcttgaagactgcaacaccagccagatcggcctcgtcctgcaagtcttcgagttcttcgcgccactgcatctgctgcatcaggaagtccggatcatgcacggtcacttccagcggcaactcgccaccgttcatcgcgagcaggtagcgcgcgcgtttcggggggcttctgagcgtctgataggcttcgttgaggctggccgattgctccagcgccagacgttgctcacgctcggaagcgtcagcgaagcggtccggatgcacgccacgcgccaattctcggtagcgcgtggcaagttgctcaaggtccagccgaaagctcggctgcagctcgaataaagcgaaatgacaaggagtacccacgaatagcctcagatgttgaagctttcgccgcagccacattcaccgcgtacgttggggttgttgaacttgaagccttcgttcaacccttccttgacgaaatcgagctcggtgccgtccaggtaggtcaggcttttagggtcgataatcactttttcgccgtgactttcgaacacctggtcttccgcaaccacctcgtcgacaaactccagcacgtaggcaaggccggaacagcccgtggtgcgaacacccagacgaatcccctcacctttaccgcgcccattcagggagcggcgaatgtgctgcgcagccgcttctgtcatgctgatagccatcattgactccttactcgtcgccaaatgcttagatcaagcctttcttctgcttgtagtcgcgaacggccgccttgatggcgtcttctgcgagtaccgagcagtggattttcacgggcggcagggccagttcttcggccagctgggtgttgctgatggtgacagcctcatccagggtcttgcctttcatccattcggtcgccagcgaactggaagcgatggccgaaccgcagccgtaggtcttgaacttggcgtcttcgataacgccagcgtcgttgaccttgatctgcaggcgcatcacatcgccgcacgccggagcgccgaccatgccggtgccgacatcagggtcttccgcgtccatcttgccgacgttgcgcgggttttcgtagtggtcgatgaccttttcgctgtaagccatggtactgaatcctcactcatcagggccgctctggaaccctgtagaaacgcctgcgttttccgccacgttcctacagagctggggtggcggcttctatagttagtgtgccgcccactcgatcttggaaatatcgacaccgtctttgtacatgtcccacagcggcgacaggacgcgcagcttgttgacggcttcgcagactttctgcgcggcgtagtcgacttgctcttcggtggtgaaacggccgaacgtaaagcggatcgagctgtgtgccagttcgtcgttgcggcccagtgcgcgcagtacgtacgaaggctcaagggacgccgaggtgcaggccgaaccggacgaaaccgccaggtccttgagcgccatgatcagcgactcgccttcgacatagttgaagctcaaattcaggttgtgcggtacacgggcggtcatgctgccgttgatgtacagctcttcaaggccttcgacctgcttgtagaagcggtcgctcagcgctttgatgcgcacgttttcggcagccatgtcttccttggccacgcggaaggcttcgcccatgccgacgatctggtgggtcgccaaggtacccgaacgcatgccgcgctcgtgaccgccgccgtgcatggtggcttcgatgcgcacacgtggcttgcggctcacgtacagggcgccaatgcctttagggccataggttttgtgggccgagaacgacatcaggtcgactttcagcttcgacaggtcgatgtcgaccttgccggtggactgggcagcgtcgacgtgcagcaggatgcccttggaacgggtcagctcgccgatggccgcgatgtcgttgatggtgccgatttcgttgttcacgtggatcacggaaaccaggatggtgtcttcacgcagcgcggcttcgatcatggccggggtgacgataccgtcggtggtcggctcgaggtaggtaacctcgaaaccttcacgctccagttggcgcatggtgtcgaggacagccttgtgctcaatcttggtggtgatcaggtgcttgcccttggtcgcgtagaaatgcgccgcacccttgatagccaggttgtcggactcggtggcaccggaggtccagacgatttcacgcggatctgcgccaaccaggtctgccacctggcgacgagcgttctcgaccgcttcctcggctttccagccgaatacgtgggaacgggaggccgggttgccgaagtttccgtcaaccagcaggcattcgctcatcttttgcgcgacacgcggatcaaccggggtggtcgctgagtaatcaaggtaaatcggcaatttcatggactttctcctaaatcaggctggctggcgtgccgttagctcttcggctgtcactcgacggcggacgcttcgatcttgtccagacgcggcgccttggtgttgcaacggcgctggtcctgacgctgggctacttcttgcacctcacggcgagtcacaagatcagccaagctgataccactcaaaaactcatggatctgcaggctcaagtcacaccacaagtggtgcgtgaggcaggtgtcgccggcgtggcaatcacccagcccctggcatttggtggcgtcgacggattcgttgaccgcgtcgatcacctgggcgacctgaatgccctgcatgtcacgggacaactgatagccaccacccggcccacgcacactggacaccaggttgctgcgacgcaatttggcgaacagttgctcgagataggacagggaaatgccttggcgctcagagatatcggccagggacaccggcccagtttgcgcgtgcaaagccaagtcgagcatggcggtcaccgcgtatcggccttttgtagtcagtctcatggacaagtaccaaggtgtttcagaatgggagcaagtatgcgattcccgagtatttaagtcaactataagacctagtactttagtcaggattacccgtaaaaagggcgcgcgaatcatagcaggatggggtggggacgaacagcgggaacagggccggatggagattgctggatcaacggaggtcaacatgtgggagggggcttgctacagatagcagtctgacagctgaagaatgcatcgactgacccactgtcatcgggggcaagccccctcccacatttgagctgcattggtcgcgaggcctcagccgaccttggtggcggcttcgtccttgatttcggcgaagtcttcttcgcgcaactcaggcagatccttggcgcaatacgggctacccagatccttcagcgcaccacacataccctccaacttgccgtccaccgcctgcagatggtcgagcaactggccgatagcgcgtgccaccgggtcgggcatatcttcgctgacaccgtaggcatcaaaaccgattttctcggccatggccttgcgcttggcctcctgctcgtcgccggcttccggcttgacgatgatccggcctggaataccgacaacggtcgcacctggaggcacagccttggtcacgacagcattggaaccgaccttggcacccgcgccgacagtgaaagggccgagcaccttggcgcccgcccccaccaccacgccatcacccagcgtggggtgccgcttgcctttgttccagctggtgccgcccagggtcacgccctgataaagggtgacgtcatcaccaatttcggcggtctcaccaatcacgatgcccatgccgtggtcgataaagaaacggcgcccgactttggcacccggatgaatctcgatcccggtcaaccagcgaccgaagttcgacaccagccgcgccagccatttccagcccatgccccacaaggtgccggacaggcgatggatccagatggcgtgcatgcccgggtagcaggtgagcacttcaaaggcattgcgcgccgccgggtcacggtggaaaacactctggatatcttctcgcaaacgctcgaacatttttaatccttccgtttaagaagctcgccacgggccgccttctgggtttccgtgaggatgccacgcaatatattcatttctgcccgactgaccgagctgcgtccgtaaaggcgacgcaggcgcgccatcaagtgccgtggtttttccggatcgaggaactcgatggccaccagggtttgctccaggtgttcatagaaccgttccagctcgtccatggtggccaactcgccacttttggtcgaggcaacctcttccttctctaccttgcttggctgaccagcagcggccagccaggccatgcgcacttcgtaagtcaacacctgcaccgctgccccgaggttcagcgagctgaattcagggtctgatgggatgtgcacgtggtaatgacatcgctgcagctcttcattggtgaggccggagtcttcgcgaccaaacaccaaggcgatttcagcgccaccggcggcctcttccaccaccttggtgccgcactcacgcggatccagcaatggccaggggatgcgacggtcgcgggcactggtgccgagcaccaggctgcagccgaccaaagcgtcttccaaggtggcgacgacctgggctttttcaagcaggtcattggcaccggatgcgcgggcatcggcctcgtgatgcgggaacacgcgtggttcgaccagcaccaggcgcgtcagccccatgtttttcatggctcgcgccaccccgccgatgttgccggggtgactggtattgaccaagacgacacgaatgttttgcagcaagggaggcgctctcggacacgggaaaggggagcaaatcttacagaacagcctaaggttatgccatgaaagctaacgtcgtccttcacctgaagaaagtttctgctagaatgctcggctttctttaacaaccttaggtgacacatccatgcagcccatgctgaatatcgcgctgcgcgccgcccgcagcgccagtgaattgatcttccgctccatcgagcgcctggataccatcaaggtcgacgaaaaagacgccaaggattacgtatccgaggtggatcgcgccgccgaacagaaaattatcgacgccctgcgcaaggcctaccctacccacggcatcctcggtgaagaaaccggcctgcacaaaggcagcggtgaaggcgaagactacctgtggatcatcgacccactggatggcaccaccaacttcctgcgcggtatcccgcactttgccgtgagcatcgcatgcaaataccgtggccgcctggaacacgccgttgttctggacccggtccgccaggaagaattcaccgccagccgtggccgtggcgcccaattgaacggtcgtcgcctgcgtgtcagcggtcgtaccagcctggacggcgccctgctgggtactggcttcccgttccgtgacgaccagatggacaacctggaaaactacctgggcatgttccgcgccttggttggccagaccgccggcatccgtcgcgctggcgcagcaagcctggacctggcctacgtggccgccggtcgttttgatgcgttctgggagtcgggcctgtccgagtgggacatggcggcaggcgccctactgatccaggaagcgggcggcttggtgagcgacttcaccggcggccacgacttccttgagaaaggccacgtggttgccggcaacaccaagtgcttcaaggcagtactgacggccatccagccgcacctgccggcttcgctgaagcgttaagcgagcgagcacaaaaaagcaccccgaggggtgctttttttatgcctgggatttgaggtttgccgcaactccagcaacaacacaaatcaattgtgggagggggcttgcccccgattgcagtgggtcagcacctaacaagctgactgatccaccgctatcgggggcaagccccctcccacattttgaactcacataattttttgcatctgtaccaggcttgagattactgctggttctggcccagcaccaagcggccttccttgtcgaccggaatctggccgcctggatcacggtccatacgcaccgagccttccttgccatccaaggtgtaacgcacgtcataaccgacaaccttgtcgctgatgtcgttgacggtgttacaacgggtttgcgtggtggtgtaggtatcgcggttctgcataccttcctgaaccttgttaccggcataaccgccaccgaccgcaccggctacggtagccagcttcttaccgttaccgccaccgacctggttacccaataggccaccggccagtgcaccgaccaccgtaccgacgatctggtgctgatcctgcacgggcttctgccgagtcacggcgacgtccttgcagacctcacgcggcgttttaatctgggttttcaccggctgcactgccagcacttgcgcatactcagggccgctttttaccaggctgtaggtggcaacagcacccccggcagtcacaccgacagcacccaataccgcaccaaccagtaacgacttgttcacatgaacctcctgaccatcacaaacggatcgaaagatccgcgctatacccagccttggagcaaaaaaaaaggcacgagttcaatactcgtgccttctttgtaacagcggatcaacaagcgcccatcaagggcggtcgtcaacctccttgccagtagccgcaggagggatcagatcttcgctgttgaggttcagccagatcagcaccacgttggcgatatagatcgacgagtaggtacccgccagcacgccgatgaacaacgccagggagaaaccccacaggttgtcgccgccgaagatcatcagcgccgcaatcgccagcaacgtggagatcgacgtcgccatggtgcgcagcagggtctgggtggtggagatgttgatgttctcgatcagcgaggccttgcgcagtacacggaagttctcgcgaacccggtcgaataccacgatggtgtcgttgagcgagtaaccaatgatcgccagcacagccgccagcacggtcaggtcgaaggtcacctggaagtacgccaggatacccacggtcacgatcacgtcgtggatcagcgacacgatcgcgccaacaccgaacttccactgaaagcggaacgccaggtagatcatgatgccgaccagcgccatcagcatgccgaggccgccctggtcgcgcagttcttcacccacttgcgggccgacgaactcgacgcgcttgaccgacgccgggttgtcgccgccgaccttctgcaaggcctcggccacctggtgacccagttgcgggtcttcgcccggcatacgcaccagcaggtcggtggtcgcaccgaagctctgcacgatggcttcgtgatagccggccttgaccagctcgttgcgcaccagggtaacgtcggcaggcttctcgtaggtcagctcgatgagcgtaccgccggtaaagtccagaccgtagttcaggcccttatggaaccagctgaacaacgccagaacggtaaggagcacggtgacgccgaacgcaatgttgcgaacgcccatgaagttgattgtacgtaacatggcagccccttaaatccacaacttcttgaagtcacgcccgccaaagatcaggttgaccattgcgcgggtcaccatgatggccgtgaacatcgaggtaaagatacccagggacatggtcaccgcaaaacctttgacggggcctgtgcccatggcaaagagaatcccgccgaccagcaaggtggtcaggttggagtcgagaatcgcagtaaatgcccggccgaagccttcgttgattgcacgctgtacggtcatgcccgccgcgatctcttcacggatccgcgagaagatcagtacgttggcgtctaccgccatacccatggtaagcacgataccagcgatacctggcagggtcagtgtagcgcccagcagcgacatcagggccagcagcatcaccatgttgcccgccagggccacggtggcgatgatgccgaagaagcggtagatggcgatgatgaacagcgacacgaacaacatgccccacaaagcagcgtcgatacccttggtgatgttgtcggcacccaggctcgggccgatggtacgttcttcagcgaagtacatcggtgcggccaggccaccggcacgcagcagcagggccagctccgaggattcgccctggccgttcaggccagtgatgcggaattgagcacccagcggcgactggatggtcgccaggctgatgatcttcttctcttccttgaaggtctggaccggtacgtccttctcgacgccgtcgaccatctgcttggtgtaagtggtgacagggcgctgctcgatgaagatcaccgccatgctgcgaccaacgttgctgcgcgtggcgcggctcatcaggtcgccaccgtggccatccaggcggatgttcacttcaggcgtaccgtgctgcgagtcaaaaccggctttggcatcggtgacctggtcaccggtgatgatcaagccacgctcgatcagtgcaggaggacgattgccttcgcggaactcgaactcctcggcagtggcgcgggtagcacccggctcggccgccagacggaattccaggttggccgtcttgcccaggatacgcttggcttcagccgtgtcctgcacgcccggcagctcaaccacgatgcggttggcgccctggcgctggacgatcggctcggctacacccagctcgttgacgcggttacgcaccgtggtcaagttctgcttgatggagtattcacggatttccgcgatcttggccggcgtcatcgccaggcgcagtacaggctgaccattgaggtcggccggtacgatgtcgaaatcgttgaagttcttgcggaccagcgcacgggcctgttcgcgggacgcttcgtcagagaaacccaactggatggcaccgttgaactgcggcaggctgcgatagcgcagcttctctttgcgcagcaggctcttcacgtcgccttcgtagactttcaggcgagcgtcgagggctttgtccatgtcgacttccagcaggaagtgcacaccaccggacaagtccaggcccagcttcatcgggtgcgcgccaatgctgcgcagccattgtggcgtggtctgtgccaggttgagcgcgactacatagtcatcacccatggccttgcgtacgacgtccttggccggcaattggtcttctgccttggtcaggcgcaacaagccgcctttggcacccgccgccaatgttgccgccttgacctggatccccgcatcagtgagcgctttgctcgcacggtccagatcggcctgattgacctgcagcgaagtgctggcgccagtgatctggatcgccgggtcatcaggataaagattgggagcggaataaataaaaccgatcgccagcaccgccaggatcagtacgtatttccacagagggtatttgttcagcatcacgccgcccgcttataacgcggggcgccttgcgcgccccgtcgattggtaaaggttgttactcagatcgctttgagcgtgccttttggcagcgtggcggcgatggcgcccttctggaacttcatttctacggtgtcggagacttccaggaccacgaaagcatcggaaaccttggtgatcttgccggcgataccgccagtagtcaccacttcgtcgcctttttgcaggctgccgagcaggtttttctgctctttggcgcgcttggcctgtggacgccagatcatcaggtagaagatgaccaggaagccgaccagaaaaatccactcgaaaccaccgcccataggaccggcagcggcaggcgcagcggcatcagccatggcgttagagataaaaaagctcatttagcactccagttgcaaatagtgaatcttagggtcggaaaactcagtccaagggcggcacagggagcccgcgcttggcatagaaggcatcgacgaaggcggccaatgtaccctgttgaatagcctcgcgcaaaccagccatcaggacttggtagtgacgcaaattgtggatggtattcaacatgctacccagcatttccccgcacttgtccagatggtgcagataagcacgggagaagttctggcaggtgtagcagtcacaggtgggatccagcggcgaatcatcatggcgatggaacgcgttacggatcttcagcacgcctgtatcgatgaacagatgcccattgcgggcattacgggttggcatcacgcaatcgaacatgtccacaccgcggcgcacaccctctacgagatcttccggtttgccaacgcccataaggtaacgaggtttgtcagccggcatcaggcccggcaggtaatccagcaccttgatcatctcgtgcttgggctcgcccaccgacagaccgccgatggccaggccgtcaaaaccgatcttgtcgagaccttcgagcgagcgtttgcgcaggctttcatgcataccgccctggacgatgccgaacagcgctgcggtgttgtcgccatgggcgttcttcgaacgctgtgcccaacgcagggacaattccatggagatacgcgcgacgtcctcgtcagccgggtacggcgtgcactcgtcgaaaatcatcacgatgtcggagccgaggtcgcgctgcacctgcatcgactcttccgggcccatgaacaccttggaaccgtccaccggcgaggcgaaggtcacgccctcttccttgatcttgcgcatggcacccaggctgaacacctggaaaccacccgagtcggtcaggatcgggccttgccacttcatgaagtcatgcaggtcgccgtgcttcttgatcacttccgtgcccgggcgcagccacaggtggaaggtgttgccgaggatgatctcagcgccggtggcgacgatgtcacgcggcagcatgccttttacggtgccgtaagtgcccacgggcatgaaggccggggtctcgacggtgccgcgcgggaaggtcaggcgaccacgacgggctttaccgtcggtggcgagcaattcaaacgacatacgactcatagttgttcctctgggccgcgtggcgccgggttacgggtgataaacatcgcatcaccgtagctgaaaaaacggtatccattggcgatggcggcttgatatgcggccatggtctcgggataaccggcaaatgccgacaccagcatcaacagcgtggattccggcaaatggaagttggtgaccaggcaatcgaccacatggaacggccggcctgggtagataaagatgtcagtgtcgccactgaacggcttgagcacgccatcacgcgccgcactctccagcgagcgcacgctggtggtgcccaccgcgatcacccgcccgccccgcgccttgcacgaagccacggcatccacgacgtcctggctgacttccagccattcgctgtgcatatggtggtcttcgatgttatccacacgcaccggctgaaacgtcccggcccccacgtgcagggtcacataggcggtctcgacgcccttggccgcaatcgcatccagcagcggctggtcgaaatgcagcccggcagtcggtgcagcgacggcgcccaggcgctgggagtacaccgtctgatagcgctcgcggtccgagtcttcgtcggggcggtctatataaggaggcaacggcatatggccgacacgctccagcagcggcaacacttcttcggcaaatttgagctcgaacagcgcatcatggcgcgccaccatctcggcttcgccaccgccatcaatgaggatgctcgaccccggtttcggcgacttgctggagcgcacatgggccagcacgcgatggctgtccagcacccgctccaccagaatctccagcttgccgccggaggctttctggccaaacagccgcgccggaatcacccgggtattgttgaacaccatcagatcgcctgggcgcaaatgctcaagcaaatcagtgaattgacggtgtgcgagggcaccgctcaccccgtccagggtcagcagtcgactggcgcgacgctcggccaaagggtggcgagcgatcagcgaatcagggagctcaaaagtaaagtcagcaacgcgcatgatggggttcgtctagcagggccgggaagtctagcggaaatagtcaaaattgaccatgaaacgtgattgaccaacggtaatcacctctctatacttcgccgccattgagccctgatggcggaattggtagacgcggcggattcaaaatccgttttcgaaaggagtgggagttcgagtctccctcggggcaccatcttaaaaaaagaccttgaaattcaaggtcttttttttcgtctgcagaaaagtggtttgtccacgcaaccactacacacccacccctcccccctcacttatgcaagatcgcccgataaatatcctccagcgccatgatgcgctgagcggcgttgagtttgatggcttccttgggcatgccgaacaccacgcaactggcttcatcctgggcgactgtcgcggccccggcctcaagcatttccttgagcccgcgcgcgccgtcgtcgcccatgccggtcatgatgattccggtggcattcctgccggcgtagcgggccaccgagcgaaatagcacatccacggagggtcgatggcggttgaccagcggtccatcgatcacctgagcgtggtaataggcgccgctgcggttgaccatcaggtgcttgccgccgggtgcgatcagggccaggccaggcaggatacggtcgttgttgcgcgcttcgcgcacctcgatttcgcacacgctgttgaggcgctcggcgaacgaagcggtgaacttctcgggcatgtgctgcacgatcaccatacccgggcatacgcgcggcagtgccgtcagcacggcttccagcgcttgggtgccgccggtggaggtgccgatggcgacgatgcgctcggtggtctgggccatggcatggccattggcggcgggcaggatcgcatcggcagtgagcttgctggccggaaccagtggtgggctgacgctgcgctttcccaggttcctgacgttggagtttgcggcggcccggatcgcggccaccaactcggccgccgactcaatcaggaaactcttcaggccggttgagggcttggtgatgatttccacagcgcccgccgacagcgcctgcagggaggtttccgcgcctttctgggtcagcgaggagcagatcaccaccggcgtcggccgctcgctcatgattttcttgagaaacgtgatgccgtccatgcgcggcatttcgacatccagcacgatcacgtccggccattcccgcgccagtttgtccatggcgaaaatcgggtcggaagccgcccccatgacgtggatatccggcgtatcgctgagaatcgccagcagtacctggcgcaccacggccgaatcatcgaccagcagcacactgatttttttggtaggcatcttcttgaagtattcccattggttggtgccgaacccagacgttgccgttccacaggtcgaacatgatcgtgcggtaaccggtactgcccatgtcctgggcggtcaggtgcaggtgatgacgctcggccagggccagcgccgcgcgaatattcaggctggccacgtcctgcgtcggcaggcggcgttgcagatcaggaaacatctcgccgccaccgaacaacttgacctggtaatcccgtgcatgcgtgccattgatttgcgcgtggcgcagcagcagttccagtgcttcgtcggcataccggccatcgaggggctgatggttgcgcaggcgccccggcagcatgaagtgacacatgccgccgatcagccgctgcggatgccaaaaggtgatcgccacgcatgagccgagcaaggtccgcaggcgcgtcggccgcgttgcaaaactgacttggccaggcgccaataccacttcggtcgtacccacgggctttttcatggcttgcggtaaatcgacggcgccaccagcttcaaggtgtcattgacgccgtggaggctttcggagtgactgatgatcaaataaccgccgcgtttaagcagcggcaacagacgcgcgaccacctggctcttggtctgctgatcgaaataaatcatcacgttgcgcaggaaaatcacctcaaactcccccagcgccggcagcgcttcgttaaggttgacctggataaagttgacgcggttgcgcaaggtcttgtcgatcaggacggtgccctcctgacgtcccatgcccttgaggcagtacttgaccagcagcggctggggcaatgtctcaatgcgttccattgagtaatgccctgtgcgcgccttggccagtacctgggagctgatgtccgagccgatcacttcccagggcgtggtgccgaggctttcggccagggtcatcgccaggctgtagggctcttcgccggtggaactcgccgcgctccacacgcgaaacatccggcccggcgcggcctggggcaacacgtgctgacgcaggaagtcgaagtgcttgggctcgcgaaaaaaataggtttcgttggtggtcagcaaatccagcgcaacctgcagttcgcccttgcgctggtcattcatgatcagcttgaaatactcaccatagctctgcagctcatagtgcttgaggcgcttgaacaggcgcccggccaccagggctttcttggcgggcgacaggttgatgccggccgcccggtacagccaggtctggaactgaccgaattcacggtcgtcgatggagacggtgtctgacatgatcgagcctcaacgcaggtcgaggtcaggggccggcgcctggccggcctcggccaggctggacatctcgtcgatggacagcaccttgtccacttccagcacgatcacgaatttgccctcgaccttggccatgccactgatgaaatcggcgcgaatgcgcgcaccgaaactcggtggcggttcgatctgcgtggccgggatctcctgcacggcagataccgtatcgaccagcagcccgatgtcctgtggctgaccgtcctcggtactcgcctcgatgatgatcacgcaggaacgccgagtgatcgccgagttggcccgcccaaagcgcgccgacaagtccaccaccggcaccaccgcgccgcgcaggttgatcaccccgcgcacaaaagcgggcatcatcggcaccacggtcaggctgccgtattcgataatttccttgatccccaggatgccgatggcgaacatttcgccgcccagcatgaaggtcaggtactgcgcatcctcatcgaccgccaccgcagtctgccgagtcgtcattactgcacccatgtcactactctcccttgtaggcgcgcatcgatcgtgcgatcagaagcgggtgaaatccgattcgtccggggcactggccatggtgtaggcgaacgccttgcgcggcgccgttggtttagggcgtggcggctgacggttgggcgtgctgccagggctgtccgcgccggcgctttgaccagcagccttggacgctgaatccagcacgaagaaactcatggcctgttgcagttgctcggcctggctgctcatttcttcggccgtggccgccagttcctcactgctcgaggcgttttgctgggtcacttggttgagctgggtcatcgccgtgttgatctgcgctacgccagcggcctgttcttcggacgccgcgctgatttcctgcaccaggtcggacgtcttgttgatggaaggcaccatttcgtcgagcaacttgccggctttctcggccatctccacgctgctggaagacagttcgccgatttcctgggcggcgacctggctgcgttcggccagcttgcgcacttcggcggccaccacggcgaaacccttgccgtgctcgccggcccgagcggcctcgatggcggcattaagcgcgagcagattggtctggtaggcgatgtcatcgatgatgctgatgcgctgggcgattttcttcatcgccaccaccgtctgctgtaccgattcgccgccctcggtggcttccttggccgctttgctggccatgccgtccgtgaccttggcgttttcggtgttttgattgatgctggcgctcatctgctcgaccgacgcactggtttcctcgacactggctgcctgttcactggtggcctggctcatcgattgcgcggtggcgctaacctgttcggaggcgctggcgaggttatcggaggcgttacgcacttcgccgatgatatgggccagcttgccgaccatgttgcgcatggcgttgagcaccatgccggtttcatctttgccacctggctcgatgtgcgcattaaggttgccttcggccaattgctcggcggcgctcgccgcctggcgcaacggccgggaaatgatccgcgcgatgaatatcgccaggcccagaccgatcagcagggatgcggccagtaccgcgatgatcgacacgcgtgagctttcatacagcgccgagcccttgtcacccgcggcagtggcgccggcgtcattgagctcgaccattttctgcaggcggctggtcacctcatcgaaatgccctttggattcaccccggagcaaactgcgcgcctgggcttcctggttctgacgggaaaactccagaacctgcttgctgctcgcaatgtaggcgtcccatgcgcttttcacgctgagcaggagttgacgatcttcatcgttcgacagcaattgctcgtaggtctgcatgcgggtttcgaactcctggcgcgcttcggtggcttcgcgttcggcctgggccttttcttcgggaatctcggtaccgatgtggcggttttctttcaagcgatagttggcggcaaaaaaacgcatgcctgaggctgcacgcatggagggcatccagttgcccttgatgtcctgggcggcctggttgacggcaccgagctgaaggatagcgaaggcgcccatggccccggtgagggccaggaccaccaggaacgagctgatcagcttggtggaaattttaagatcgtagaaccatttcatcggggaacctccatggaattgcaaagacgtcagcgggcgacgagcggtggcgactgaggcgcctgggccgtgcgggcttccagttgtacgatttgattgagtagcgccggtacatccaggatcaaggccaccgcgccgctgcccagaatggtcgagccactgataccgcgcagtgcgccgaacaacttgcccagtggcttgatcaccgtctggaactcgccgtgcaggtcatcgaccaccagcccggccttgtgctcggcatagcgcaccaccaccacgttttgacggcgggcggccgggccttcgtggctgaagtggtcgcgcaggtccaccaggggcagcacctcgccacgcaggtccagatagccctgatcgcggctcgactggcgctggcgttcatccagctcgacgcattcctggaccatgtccagcggaatcacgtaggtggattggtcgacgccgaccaggaagccattgatgatcgccagggtcagcggcaagcgaatgcgcaccaccgtgccctggcctgggcggctgtcgaggtccacggtgccgcgcaacagcgtgatattgcgcttgaccacgtccatgccgacgccacgcccggacaggttggtgacggcctcggcggtagagaagcccgcctcgaagatcaggttgtagacctcctggtcggagagcaccgcgccgctggccaccagcccgcgttcctgggctttttccagaatgcggtcgcggttgagcccggcgccgtcatcggcgatttcgatgacgatgcttccggagtcgtggtaggcattcaggctcagatggcccttgctcgacttgcccgccgcacgtcgcgcatcggcgctttcgataccgtggtccatggcgttgcgcagcaggtgcatcagcgggtcgccgatcttctcgaccacggtcttgtccagctcggtctccgcgccgctgatgatcagctcgatgtccttgcccagttcctggctgacatcgcgcaccacgcgacggaagcggttgaacgtgtcgccgatggggatcatgcgcaggtgcagggcaccatcgagaatctcttctaccagcccggacaccgtcgaggtggcctcttgcagcgggtcgttgttacaggagcgcgccaacaggctggcgccggcgctggcgatcaccaattcgccgaccaggttgatcaactcatcgagcttgtcggcgttgacccgaacataactgccgtcgcgggttttcgcctcgctgttcgctggctggcgctggggcgacgcgggggccaggcctggctcggcttgcgcgatcaggtcactgccgatggcgacgctgcttgcgggcgtttcgtcgacggcgcggatgtgcacgtcacagtcgtcgcgcacgaagtcgaacacttcgttgagcgtggcatggctggccgtcgaacgcaggtcgatctcaaagcccaggtagcagctttccgggtcccagtgctccagggcggggatgctgtcggtcagggtggtgacctgcaccatttgccccagcgtatcgaggtagcgcaggaacgacagcgggtccatgccattacggaacacgtccacgccgaaacgcagagaaatatgccaaagcacgtcggcccccgtgtcgtcgtgcaccgcagcgggtacgacgtcggcggtggcgctgcgcagcggctggtagtcgctcagcgcctcgcgcaaggtctcaccgcgctccagcgtggccggggtcggcgtctcaccgcgactggcgaccacgtcgatcagttcaagcatgtggtcgccgcacttgagcagcagcgcaatcaacgccgcgtccaccgccacactgccatcgcgcaggcggtcgagaacgtcttcgacgatatgcgtgaaccccacgatcgacgcgaggccgaacagtccggcggatcccttgatagtatgcgcggcgcggaaaatcgcgccgatggcatcctggtcgccggggtcgctttccaattgcagcagggattgctccatggcctgcagtagctcgcgcgcctcgacgatgaaggtctgcagtgcctgatcgagattgatgctcacctggactttccttgtcgatcaatgaacgggacagtgccgcttaaagagcggcgctgcgacacagttggagcgcctgcatgactgcctggctctggccggtcacactcaaggcggtgccggcaatgccggcttcacgctggatgacggccagcaactgcaggccggcaccgtccatttccgtcacctgggacaggtccagttccaggcgcggcgccgcgcccatctgcggccacaacgcgcccgccagttcagcgacggtgtagatcgtgagttcgccgtcgatgcccacatgggtagtgtcgtcgattgtttcgtgagtgatcggcatgttggcctccctggcgccgggtgtcagggcaggatcaatttggagaccgccgccagcatctgcgccggctggaacggcttgaccacccacgccttggcgcccgcggcctggccttcggccttcttcgattcctgagactcggtggtcagcatgatgatcggtgtgaacttgtagttggccagcttcttcacctccttgacgaaggtgatgccatccatgttgggcatgttcacgtcgctgatgatcaggtgcactttttgcccggtcagcttgttcagggcgtccttgccgtcgctggcctcgatcacgtcgtaaccggcgcttttcaaggcgatgccgaccacttggcgcacgctgctggagtcgtcgaccactaatacattcttcgccatgatgtgctcctaaaagaaagtgatgtcttgggaattcgactgcactgccgcctcgccacgatggaggcgtcgttgctcgtcagtggcataggtggtttccatgcgcgccagccactggcgagcgtcgatgtccagcggctggtccggggtctggttggcctgttgcagatggtcatgcagggcgtgcatgttgtcgcgcacgtgactgaggatctggctgacccggtcctggaattgcaggttgaccaacacctcggtcatctcatcgcggatgccgtagctttcctgtttgagcaggtcggcggattcggccagacgcccagtgatgttctggaagcgtgtgagcaccatttgaatactgttttcggactcggccaccgaatggctgtcctggtcggcactgctggacgcggcctgcaccaattgagtaatggcgttattgatgatgtcgaccttggccgacatctgctggcccgtttcactggatttgctcgacaggctgcgcaccgcatcggccaccaccgcgaagccgcgaccggcctcaccggcgcgcgccgcttcgatggccgcgttgagggccagcaggttggtttgtgcggcaatcgctgccacatcagcggccatggtacgcagttcgcccgtataggcggtcaagctgcgcacctgcgccagggtctggtcacggctggtttgcgtggccttgagcgaattgatcacctggctcaactcgctgtcactgcgtgccagcacctcaagcgcgccgtcagcggcctgcccgtccagctcgccggccgcgtgctgcgacgcttgtaccgtttcctccaagcgggtggcgatcccggtgaaacggttcaccaggctcacaatcgcttcctcggtctgatggcgcgagctttccacctgcttggcccagatgggcatggcacccagcaatacctcatcgagctgtgcacgcgaggccaagccgttatgcgcgtgcgcactcgactggtccgcctgcgcctgcgcaatcgctcgctgcagcgcgttgcgctgcgaagccgcgctccaggcacaggcaccgaggccgatcatcaccagtaccgtgcaggccagcagattggccggcgaagtggattgcacgagtatccacacaacggccggcacgaccggaatcaaggcgaaccaacggaaacgaggataaacgggaaggtgcgtgcggctggatgggcgctggggcatgagttcgatccttgaacagtgttgcggatgtaaacgacatagaggctatccgcccctagcggctcaactttaggtctgttgagtaccttccgtctggtttatgaccggtgtgtgactgagcacggagttaagtgtaggtgacgcccgctgacacgcttaggctgcttgcaggatcgtacaagcgccctcgatccctcgttcgctaacctgacgactcttatccagcagagtctccgacatgtctcagtcacagcccccgacacaccccataaatctcatccaaaaagctgacctgatcgaccaaccatggagcccacgcgtcgttgcggagatgaacgactaccagttcaaagtcgtgcgcatcgaaggcgagttcatctggcactcccacccggaaaccgacgaggcctttctggtactcgacggtaccctgcgtatcgaccttgcagacggcccggtctatgtcgcaccgggcgagctgtacgtggtccctcggggcgtagcgcaccgcacagccgccgaaggcgaggccaagctgatgatgatcgagccacggggcatcttgaataccgggcatgaaggtggggagcttacggctgtgaatgaccagtggatctgaggctggcgtcgcctgctcgctcatactgttatgagacactcactccacttatcgtgtcagccttgaacaggtcaagacgcggccgccccggacgagcggccggtagggttatttcagcaaggcaatcagcgtgcagaccaccgtgatcgccagcgccggccattgcatcggcatgaaaaagaagtggtggcgcacgccatcggcgtgcggttgtcggttcagtacaaagcccagcacggtgttgatcgctgaccccgccccgaagccgagcaacacctgcatcagggatgtgttgccgggtttgacgctggggtcgggccacagccacattaatagcagcaccatcgccaccggtgtaaacaacgtcagccagcctgcgccgcgatagatcatcgattaatcctcacaacttgcgagtctgtgggggcctgggtgggaagtgagtgcatgcgtttttccgtccttgtaatgggtcaagccttgcaccgcccccgtctggtggccgagtgcatttggcacggcgagttggaacatggctaattaatattgttccttgggcaaatgacttcacaggggcgtgagcctggcagttcgcggtattggggtcttttttttcctgcgtagaacagtgatcatcgccctcccccaagccctaggaaccaagaccatggagttgacgctggaagctgttgcgctttttgcactgaagctggtgcacgagacggacggcggcagcccggtcttgcgggacgatccggtgatggatgggtatgagcgggaggtattcgggctgctggtgcggcagggagacttggcggccattcaatccaaagtcgcggaatgtgtggatcaagcgcttgaagcactgggcggggccgatacggtgatggggcgcgagttgcagcgcttggcgctgggcgtgcgccaagcgtcgacactggatgaactcaatgccccgctcaacgcactcaaggattacctgaaagccattctgtaacgcgcggttcagcgccgcccttccaccgccatccgcaccgccaaccccatcaacaccgagcccatcaaccagcgctgcaccacctgccaacccggccgggtaacgaaaaataccgcgatggaacccgccagggtggcaatcaccgcgttgacactcacgctgataaaaatctgcgtaaagcccagcaccagggattgcgtcaacacgctgccatgaccgttcgggtcgatgaactgcggcagcagcgacaaatacatcaccgctaccttggggttgagcaggttggtcaccaggcccatggtgaacagcttgcgcgggctgtccttgggcaagtcccgcacctggaacggcgaacgcccacccggccggatcgcctgccaggccatgtacgccaggtacagcgcgccgccgaaacgcagcgcgtcataggcaaacggcaccgccatgaccaaggccgtgatccccaaagccgcgcacagcatataaaccaggaaacccaaagccacgccccccagggaaatcaacccggccgtgcggccttggcagatcgaacgggagatgaggtagatcatgttcgggccgggcgtgagcaccatgccgagtgaaatcagcgcataagccagccaactggacagttcgggcattgttgggctcctggggtgttaggttgtcagcgaaatatttggtcaaggttgtcggcttggccgccatggtagggcgttcaaaatgcgcgcgttagatacagatccgcgagcaaaacggcatacacccaagaggcaggacatgatcgacttcaacaacaaaggcttcttcaagctcaagcaaaacaacgaatacgccgaacgcgtcgtcgccctgctgctggacggcgaagaagtgatcgacgcttacaaggccatgcgcgacggcgtggtgttcaccaccaagcgcatcatcgcggtgaacgtgcaggggattaccggcagcaagaaggatttcacttcgctgccgtataaaaatatcgtggcgtattcggtggagacgtccgggacgtttgacctggattcggagttggagatttatttttcgtcgctgggcaaagtgaaattcgaatttaccggcaagacctcgattgtggaaatctcgcggttgatttccaagcacctgctggcctgatcggcaggcaattgatttagacggcggtcccccaatcaaaatgtgggagggggcttgcccccgatagggccccctcccacaccatcaaaccacagccctacacaccaacgccttccccttcctccaccgccccattcggcaacatcccattcgccaaatcatccaccactgccttggccatctcccccaaataatgcgccgcccaggcatagcgatctgcactggaatccatggctgcatccaacgccagcaacttggaacagtgcaacagctcggaggcatgctccagggcatcacggatgggcacgccggaattgacgcggaatagacggtggaggttcggctgcttgccgcaggtggagaaggtgatgatgccgagggtgttgttgaggggtgggttgatcattgggcacctccagagtggttggagatgcttacgatggtattgcgtgggtacgacctgtcagaaacgctcattggcttaactcctaatgtagataagagccgccacgttcgtttccaggcgagtgggtggcagctatgcgcaggctggaaaaccgggacaataggaacccggcagacccgaaggtctcccgcgcacagccgccataacacgaatatgctggcacaaaaacaccagcaatcgtgataaatagtggcacctgtgcgctattgttccacgggtttccaggcccgatcgccgaatgtcgacgacacgccaaaagtagcctaaagactgattagcggaaaatcggctttgtggctaaacgtgtctgatgaggcagaaaaaaattaactgaaatcaaaagccaataactctttattaaacaatataaaagcagtcgacgagaccagcacacatatgaaacctgagcaaaagacattaaatttagattcattttactcggacatactaaaagaggacgaattaggagcagccatccgcacgcacatttatatagagtcagctcttgagcagctgattgaaatattagtttcagattatgagcacatcaaaaagatgcagctcgacttctctcaaaaggtaaacctagcagttgcggtaggaatgccaaaagatttcgccccagcacttttagcagtcgggacgattcgaaataaatttgcgcacaggattgacacaaaaattgacaaggagaaaacaaacaacctttacaaacagctttcacccgaccagagaagtgcgatacatgcatcattcaaaaacacgctaaaaaaaacaccactagatcaagcgaggaatctttccgacatcacacctaaagagcaatttgcaattttatctgtagcattattaatgcaaatcctcaccctgatacaggcacacgatagataaaaaagctgaattgattggaaccacacagtacttttattaaaagcgtgatcttagcgagaactgcaccgttcgtatgaaatttacagcatcaactcataaggccccagcaccttactagtctgcaccaacccctgccgcatcaacatctcaagataactccccgcctccatcggaggccgcttcaacgcccgcctctgcttctgcgccgctcccagcaccgccgcctgatccagatcccaaagatccgaaataaagtcatctggatgcatcggctcaatatcataagcagacagaatgtgcgccgggaaatctttcaaattgaacgtcacgataacctcagctttgctccgaattgccgccgccagcacgtgacgatcatctggatcgggcagatccagactcgagcacagatcctcatatcccgtcaccaaagcgtcaggtatagccttgtccatcagcgctgacgtgcaattcacttgctccgccgtcagatcgggccggttcttgagtacgttgcgcttccactcctcatgaatctggcgggtccatctcgctcgatacagccctgacaagccaagccacatcagtaaatcccgaagcgctgccgggtaaagaacacaagcatcgtatacagcagtaaaaggcgaacacctcatccgtcataccccattcccaactcctgtgcctgttgtgccaacgcttccatcgcctcctgactttcctcatccctccgctgcttgaacgccatcaagtccgaaaaacggatgcgtcgatgccgaccggtttttgtaaagggaatagcgccctcctccagcatcttgaccaagtgcggccgtgaaacgttaagcaggtcagccgcttcctgcgatgtcaattcagcgtgcaccgggactaccttgaccgcattgccgatcgctaactcgcccaaaatatcgaccagcaagcgcagtgctgaggtggggagtacgaggctgtgaggcttatcttctttgtcgaagatgtcgatgcgctgggtttcaaatttggtcgacagcagcgaggccagctcacgctggccttgtacggcagcttcgacttccttttccagaggaggaatggttttagggaggtgattggccatcatgatgcaactccggtgtttcgaaattcagttgagaccaaacctaaacgaaacaaacgaaaatcgcaatattcgaaacaccaacatcgggcgctacccaataggctcctacttccgcttggtaagctcatcacctccttcgcagaaacctgcgataccaacccactccacccgccacggccccgacaacaaccaccccattccccaccagccaaagcccaaaattccggctctgctccgcatccccctcataaaacggcccaaaatacgccgataccaccactaccacaccgttaaacaccccaagtgccaccgcaaccaccagcacaacaaacaccacccccttaaccactttcaggcaaccttccaaaaccagatctccctggactcgtgataatccgagaacgtcccttcaatcgaaaaccctagttgaatacgcggatagctcaaccagtccgtcaaccgccgcccgttccataggtcgatgtgatcaccactgcgattaccaaacgtttcgtttccccggcgccaaaagtctttgaagaagatgatgccttgttgcccagtcaactcatcctcgaagttttcgggttttatctttttcatgcttcgtaaaccggaagtgacgatacggcttaatgcgttggccatttcctctgcggccagtatgtgcccctcgcttttgggatgctgccaacaatagcgcacgctgcttaatctgctcaggtcaacgccagatctacgcagtgccacttcaagattgatcgcgcattgatcactgaaattcttggcgccgttggttctgcatggtgctgcgtcgccaaagatttccgggtggtttttccatagggtgttgaatgtcagcattctgcttttccatgcgtattttttccgcgaccgtagcaaacacggtgcggctgaagagaactccagagcgaatccagaaaggtcctacgcaagaactagacctggtttgcaggacaacacgcacatacctgtcgcgcgtggatcaaggagctcaaacgctcgccttctagagcgctgacaacctgttgccttttcccacgccagccatcgaacaaagccaatacctcccatcgctcccccctcgtaggctcacctcctcgcacaaggaagtgagcccgtcatgccagaacgcttttacccacccaccgaagaagagttacgcaaacaacgcatcctggcaccgcagccatcgcgtgcgccgtattcgccatcggttgattttttcgagccatcccctgtcccagcccctacgcgagccagacctcccggctgcgtcttcatgaagccttgccaattgcctgacggcatcactcattacttcaacccggcagggtatgtgccgttggagctgatcagggagtacggccacttaagcctgctgggtgggcgtgaggtggacagcaggggcgcggttgccttgcgcaagatcggcggcagcacattgcccgctggcttggggcagttggcgttgcggtcggcggtttgggagtcggcggcgactgccgttggatcggtcgccgggggcctgctgacgggtttggtggcgctggcctggccgtcagagttgggtgatagcgcgctctacaacgaggagcagttgcgttcgatgcaacgggcgcggtcgcagatgcggttgcatatcgagcaacgcgaggacggcacgctcaaggggtatgggttctacacgggcaaccatgccgattggcagatgattgatgtggtgcagtttcaacagcgtaacgatcagtttgtggcggatttgggtgagggtgtggagctgatctggacgcccgccgttgatcccagtgacacgctggggattccggccttggaggctgcgccgcaagcgccggtgatctggatttatccgccgacggagaaagcggcgcagattctggtgaacccggtttatccaccggagtatcgggattttattctggtgttcccggtggagtcgggggtacggccgctgtatgtggtgctcaacaagccaaggaaaggttggcttacgtgaacgttggatagacgcaaaaggaagaaaaatatttgaatgggattccaagaaagccgagctggaagtctatcgaaacagtgacttggaacacctcggtgcatttgatccttataccgccgagcgtcgaggaccggcggatccgaaacgtcgaatttatagataaagaggattttgaaatggtgatgaaaatcagactgcgatggtacgaaaagcacagcaatgacttgaaagcggatgaatactcagcggatatcgcagacccagacagtatttttgaagcattgggcttaagcgaagagaccgcgatatatgccgacgtattcaacgtccaacccaattggataacgctaattcagccgtacttccagcacgtgatccaacccaaccacctcgactaccaaatctccttccgctaccaaggcgcctggccaccgcctccaaaacagtccaaaaaggcgtcgtgatgcaattatagaacagaagagaaagacgcgaaaacgtaacggcggcggtcttcgggaacgttggaaggacgcgaaaggaaagagactttttgagtgggattcggaacaaggtgagctggaagtccaccgatacagcgatgtgaaacacctaggttcatttgacccatatacgggagagcagcggggcccggcgaaagatgaacggcgaattacaaaataaacggagagtcaatcatggtgatgaagataagactggaatggtttgacaaacaaaccgaaaacttagaggcggacgaatactcagcaaacctcaacgaggatgatggcattctcaaagcactggacctccatgacgagcctcaaatttatgccggaggattcgatgttctcccaagttgggtagcgattctccagccacatttccgacacgttatagagcctggccttttcgactaccaaatctccttccgctaccaaggcgcctggccaccgcctccaaaacaatccaaaaaggcgtcgtgatgcaatgaaacccacatcgcaaaaacccctcctctaccgctcagtcaacacccgaacccatggcgtgcgccacggcagttgtcgcgcctaccggtatgagcggcacaccaaaggcgaaaaagacaaacaatcaaaccgcgggtcgatgcatagccatcaacggcatggctttgattacaccccgctattccgctttctcctctccaaagtcggccacccatgggaccaggtgttcagcgaagccaacgcccgcctggatcgcccagagccggtgttctggatggtcgcgcaacatgaaagcgacaagcaggattacgtgagaacggatgaaaacagctactacagcggcttgtatgtcgacgaaggcggcctgctgcaaaaggtcaacccacagctgacgcccgagcagatgaaacccttctgcaactgcagcacccacaccttcaacggtgtggtattcccgcagggtctaccacacaacggctaaccctcaacccgacttaaccccactccccgcctcagccaccggtacccgattcgccggatcggtcacgtcatacacatgctgctcacaccccgagcccttgaattggaattccaccaggtacacctttgccttctccgggctgaacgtattcatcactggcccgcaggtgtagtagtaaccggtgcgggtatcgttcgcgtaccccgataccgtgagtttcttgccggggtcggcctggatttccagttgtgggaatcgcttgaagcccgcactggccacggtctggttgagcttggcgatccagttgaagaccttgccttcgccggtgtccatcacggtgccgagggcttccatgcgtgggtcggggtcgccttcgcggctgatcgagaagtcgacggcgggagtgccgccactggacttcatgatgactttggcgtgttccgcatccacagccacggttttctggcgaaactgaatgccgtccttgagcaggctgggcgatgagtcgcgttggttggattggcaggcgcccagggccagggcaatggagagcagcgcgattcgcttcacgggggatgtccttatcggggaagagtgtgatgactggacccgaatttaaacggattgttccgcttcaggagggatgagcgatgccgccgttcaggcgctctcaaacaccaaccgcgcgcacaacccaccctgcttgcggttatgcagcgccaaccggcaaccgatcttgcctacgatcatctgcacaatcgccaaccccaagcccgcgccattggcattatcccggctgtagaaccgttcgaacaggcgctccatttgcgcctcatcaatcccggggccccggtctttgacactcaaacaatgagcccccatcacgactgtcacttcactgcccgccggggaaaagttaagcgcattggtcaccaggttttgcagcgcaatcgccagcgccacgggctcggtttcgacccagcagtcttcgttgccttcgagcaccagctctacgcctttttccatggccaggggggtcaattcggcgagttcttcgcgcaccagttcagtcaggtgcacacggccgcacacggggttgtgcaactggggttcgatgcgcgccatggtcagtaactggctaccaatacgggtagcgcggtcgacgccattgactagaaaatccaaggcttcgcggcgctgttctccagtgacggcgctttgcgcgttctgcgcgtgaatgcgcaggatcgccaggggcgtgcgcagttcatgggcggcgtcggcgatgaagcggcgttcgcggtcgagcagttcatccacttggaccagcagccggttcagcgcggtctgcatgggttccaggtcggtcggcagtgggttgaggtgcagcggttgcaaggtttcggtattgcgtccacgaatcgacaacaccatggcgcgcagcggtttgaagccccagccgatcaccagccagatcagcaccgtcagcagcggcacgccgatcagcgtgggccacagggtgtggcgcatgatgcgctggatcacgtcctggcggatgtcgtcgcgctcacccacccagatcaacacgccctgttgcgggtcggtgaggagaaaggcgcaccagtcgttgccgttgtccatcaggtcatgggagcccagggtggtcggcggcgccgccagcaccggcgcttcggcggagcgcaccagcagctcacccgcgctgttccagacctggaaggtcaggcgggtttcatagggatgggccacgccgtcctcgccgacgcggctcatggcctggtcgaacgcctggtacaaccgttcccaacccgcgtcctcagggtcacgctggcgcagcacgccttgcagcaggcgcgcactctgggcgagttgggcgtcgtagacttcttcgatttcgtggtggctgtcgcgcagtaccaaccagctgatcaaggcatcgcccaacaggatcaacaccaacaccgggatgaggatgcgcgcgcgaaccgaggtcatgcggtgagtaccagcacatagccgacaccgcgtacggtgcggatcaactcggtggataactttttacgcaggttatgaatcagtacttccaacgtgttgctctcgacccggtcctgccagccatacaacgcgcgggacagccgctcgcgggtcacgaccttgccggggcgcaccatcagttggtgcagcagttggtattccatgggggtgacgatgatgtcggcgtcctggtaacgcacctgctgcgtggccgggtcgaggctgacgccggcgtgttccagcagcggttgcgcgcggccctggctacggcgcaacagcgcacggacacgagccttgagttcttccacatcgaagggtttgaccaggtagtcgtcagcgcccgcgtccaagccggcgatgcgttcggcggtgccgtcgcgggcggtgaggatcagcaccggcaagtcgtgttgctcggcgcgcagttgctgcaacaggtcgaggccgtcgaggcgtggcaagccgagatcgagcagcagcaggtcgaacgactccgtgcgcagggcatgcagggcggcaacgccatcttgcagccagtcaagggtgtagccttcggcgcccagggccacgcgaatacccaggccgagggcacggtcatcttcgacaaggagtaggcgcattacggattctctgtaggaaacggcgaaatcatgccgggtttcaccggcgcaccctcggcaaagatgttactgctcgttgccaactaagcttgcactaaggttggttttgcactgtgcaaactcctacgtttgctgagagcttttccatgcgcaaaattctcctgctgtccctgattctcgccagccccctggccgtcgccggcccgcagtgcaccaccgccgaacgctcgcaatggcaggacgaaaaagccttccaggacaagctcaaggccgaaggctacaccatcagcaagttcaaggtcaccgacggcaattgctacgagatctacggctttgacaaagacaagcgcaaggtcgagatctaccacgacccggtcaccggcaaagccgtgaagaccgagatcaaaggctgatgccgggcgagtccctgcacctgtgggacccgttggtgaggctgtttcatctgtcgatcgccggggtctttgtcgccaattacttctttaacgaagcaggcgacgactggcatgtctggctgggctactacgccatggcctggttgctggtacgtggggtgtggggatttgtcggaccgcgtagcgcccaatggacggacttctggccgacgccacgacgcctgactgcccacctacgctcgctcctcagcggtcggccacagcatcgcctgggccattcgccgattggcgcgctggtgatgctattgatgttgctggcgctgctgaccctcggtatcagcggttttctgatgcaggaggtcgacgccttgtggggtgccgattggccgctgcaaatccacgagactgcggccaatgtgcttttgggcctggtctgcgtgcatgtgctggcagcgatcgttgaaagcctccagatgcgggacaacctgcccttgtccatgctcaccggtcgcaggaagcgcctgccggatgaacgtgcgccgtaattctttgacccacaggttctctatgcgctccgtcctcctgatcgtcggcctgctcgcggtgtttttcgccgcctggcaaagccatccgccccatgtactggcaccgtttgcccaggtgagcccgaacaccgccaaagtggcatcggccccgcagtacaccagccggtttgtatcgacacagctcaccgactttgtgcattcctcgtccgtcaccgccctgcccggtggcgacttgatggcggtgtggttcgccggttcccgcgaaggcgccgccgatgtgcaagtgcgtaccgcgcgctttgacgcccacaccggagaatggggcgccgagcaggtactggccacacgggaaagcacccgcgacggcacgcagcgctatatccgcaagctcggtaatccggtgattgccctggcgccggaccagcgcctgtggatgttttatgtgtcggtatcggttgggggctgggccgccagtgcgatcaatgtgatggtatcggatgacctgggcgccagttggtcggcaccgcggcaactggtgacgtcgccgttcttcaacatcagcacgctggtgcgcgccgcgccggtgttccatgccgatggctccatcgggctgccggtgtatcacgagttcatgggcaagtttgccgagtacctgtacttgagcgccgacggggcggtgatcgacaaattccgcatcagccgcggcaagcattccctgcaaccgactatcgtgccgcaggatggcctacgcgccgtggcgatgttgcgttacgccggcgacacccaccaccgcgtgctggccagccgcaccgaagacgccgggcagacttggagcgagccctacccgctggcgccagccaaccccaattcatcgctggcggcggtgggcacgcaggatgatggtttgctggtggctctcaatgacttggaggacggtcgcttcaagctcagcctgtatggcaccgacgcacagctcacacagtggcgcaccgtggtggaactggaccagtcacccgacccgctcggccaaccgttttcgcccgaggcctataaagcaatcatcggcgagggcttccgcgcctccagcggtgcccggcgcctgccgctggagcagcgcttcctcagtaacctcgactaccgcgtgtgcaaaccccagggctgcgatttcgaatacgaatacccgtatttcagccgcagcccggacggcatgtaccacctggtgtattcgtggaataacacctttatcaagcatgtcagcttcaacgaagcttggctggcggagcgtctgtgatggttgctgtgtggcaggcccatttgagttttgtgttgctgggtttcgtggcgctgagcgcgctgcgcttcaccgaagcgtggcggccatggttgctaccggtgttggtggcggtgagttttatcccggtcaatgcgctgcccctggcggcgtatgtgcgcagttttactgatgacttggcgatcagcaccttggtgttgttggcatgggtggggttgtgccggctgggcgtggtgcgggcgctggatcgaccccatcaggtacagatgctgctgctctttgggctgctgagcctgttgctgtaccccgccaccttgggcctgacctatttcgatccttatcgttggggcttcaaccctcgcccgatgattgtgctagtggccgtggcggcactggtgatgctgtggctgcgcaacacgctggcggtgtggatgttggcggtgggcacgctggcgttcgcgctgcggctcaaggcatcggaaaactactgggactatctggtcgatccgctgctgacggtctactgcgtagtcgccggactaatgcaattcaaactgtgggagcgggcttgcccgcgatagcggtgnnnnnnnnnnnnnnnnnnnnnnnnnnncaccgctatcgcgggcaagcccgctcccacatgggttctgcgtcgttttaaagaatgggaaaaataatgagtgcgttgcaatcacgccgcctgcgctacggcgtgggcgcgatcgggttggtgtttgtgttgctggccgcgttacggctaatgtttgtgctgggtttttccggccttggcttcagcactccggccctgctggaaaccgtgggcatcggcctgcggttcgacctgcgcctggcggtgctggtcctgctgccgctggccgtgctggcatggctgccgcgctggaacctcatcactctgccggccctgcgctggctggcacgcgggtatctgacggcagcgctggcattggtcggcctggtgtacatcatcgacttcggccattacgcctacctcggcgtacgcatcaatgcgacggtgctgcgctacctgcaagacgcacagatttcacaacagatggtgtgggaaacctacccagtgctgtggataactgcctgctggctggcggcggtggcgctgtgggtctgggcgctcgtctgtctcgaacgattgacactcgaccgtgcgcccagcgccagcggcaagctgtccttggtcgccgtttccgccattgcagtggtcggcgtgctactggcgctgctcggccgcgtcgcccatctcaatctggagaacccggtgcccttacgctggagtgatgcgttcttttccggcaacagccaagtggcggcggtaggactgaacccggtgctgtttttgtacgacaccctcaaggtcggccagtcgcagtttgatgaagcccaggtgcgcaagcattacccgcagatcgccgactacctgggagtcgaccaacctgatgcgcagcaactcaactttattcgcagccagagcgtgcagccgtatcgcctggcgggcgagcgcccgcccaatgtggtcttcgtgatgctcgaatcccttggcactagcgccgtaggcgcctacggcaacccgctcaaccccacgccgaacctggacaaactggccagccaaagttggttcttcaagcacttctacgtgcccgtcaccggcaccgccaagacggtgtgggcgagcatcagcggcgtgccggacgtgacccgccaggaaaccgccacgcgcaacccgctgattacccggcaacacacgctgatcaacgcgttcgagggttaccagaagttctacatgatcggcggcaatgccggctgggcgaatatcaacgcgttgatccgccagagcatcgacggtgtgcagctgtatgaggaaagccactggcgttcgccgcgggtggacgtgtggggcatctccgaccttgacctgttcaaggaaggtgacgcgttgctgcgcgcggtcccgaaagaccaaccgttcttcgcctacctgcaaacctccggcaaccatcgcccctttaccatccccaggcacaacgatggtttccaggtaaaggacgtgaccctggagcacgtccaggccgccgggtcgcgcagcgtcgagcagtacaacgcggtgcgcttgctggactacaacatcggccgcctgatggaaatcgccaaggccggcggctggtacgacaacagcattttcgtgttcttcggcgaccacaacacgcgcatcagccagatcccgcacatggcgccggcctttgagcagcttggtttggagagcaataacgtaccgctgctgatccacgcccctggcctggccccccgggtgatcgaggaggccgtggggctggcggacctgttgcccaccgtcgccggcatggcgggcataccgtttcgcaatggcgcgctggggcgtgatatccagcagccggcgcccgaaggcgaacgcgtggtgccgctggtgttgcgcgaaggcaccttcccgatcatcggcggcgtcacccggcacttcctgctgcagatgcaacacgacggcagctcgccgaccctgcatgacctggcctcacccagcccgcgagagaacgtagccgcgcagcaccccgaagagtttcaacgtttgcagggcttgacccgagggctgcatgagagcgcacggttgatgctgttcagcaacgtacgagagtgattattggggctggaaagtttcgaggtaggccaggatgtcggcaatcttgtcctggtcgctgatgccccaaaaaatcatccgcgtgccactcaccaccttcttcggcgcttcgatataggcggcgagcttgtcgcgggtccagaccacaccggagtttttcatcgcgtcggaatattgatagtccgtggtcgtcccggcgggcctgccaatgatgccgttgagctgcggaccaaaaccgccgcgcgcaccttcgccgatgctgtggcagccgccgcaggtcttggtgaagagtttgccgcccgcctcggcgtcgccggccgccaaagcggggcttgcgttgagggccagggcgagggtgaacagggcgtacttcatggcagactccacagcagttgtagcgggcgattatgcctgtttgtctggagcgcatgctcatccagattaccgtttcagtccttggggtgcgcagcgccactatcctcccgccccccttgcgcaaatgtgcaacctagaccctctgaatgaccatccatcgcttcatacatatccaatcgaacctatgcagctgtgttctactccacctctatgaaccctgatggtggagtaaggatcatggctcagccatcgattttggtattggaagacgacgaaatcattcgggcgttgatggtggatgtgctggaggaattcggcgcggtggtgacgtcgtttccttcggcggatgaagggatgatttacctggagcggggcgacgatccggtggacctgattgtcagcgatatccagatgccgggtttgctcaacggctacgatctgagcaaggtggtggcgcatcgttggccgacggtgccagtggtgttgacctccggtaatacgaagctggcgacacagttgggcggctcggtgcggttcctgcccaagccctggagctccgaacatttgatccaatgtgtgcaaaccgcgctcacccagcaaggtctatccatgcattgatagcgcttcaacatcactcgaaccgaacttcatggcgggcgctgtggtcattgatgaagcaaggagcgacttttctgatccgctggtcagccttttcgccttgtgcgtacagctgcctgccttgagttgtgtagaattgtcgcccattaaaacgcgtcattcatggccgagaggcccacagttcgagctcactgaatgcattcacaggcccatgacgttggtgcgccctctttgctggaaacgttgcgcacaggcacggccctgctgcatgtggcgttggaaaagcgcctgccgtttttctctgagcgcctggatgccgattggtatcagcgcttgcttgaggcgtactacgggttttatgggccgatggaagcggcgttgtacgaatgcgatttgatacctgagggcttcgaccaggggttacgtacgaaaaccccgacgctagtgcacgatctcgatgcactgggcctgaatgaacaggctatcggcgccctgccccgctgcgccgaactcccgaatctcgacacccccgccgcctgcctcggagctctgtacgtgctggaaggcgcaaccctcggcggccaagtgctgcgccgggaaatggctcagcgcctgagcatcaatgccgacaacggtggagcgtttctcgatgtatacggcgccgaaaccggtcgacgctggaaagactttctcgattacctgggccgcctgccgctggatgcccccgccaaacagcgcgcggtagaggcagcccgttcgacattccgctgctttgagcaatggctcgacagccaggaggtactgctatgaaacccgaagattttgaagagctgcttgccaactgtgccaacgagccgattcgcttcccgggggcgatccagccccatggcgtgctgctgacattgtccgagcccgagctgaatatcatccaggtcagcgccaacgtgggcagcatgttcggccatgcgcccgaggcgctgctgggccagccgctgcacacgctggtgggcgccgagcacgcccaggccgttgctgccatggccgaaaacaacacgttttttgacgcgccaccgctgcacgtttcctttaacggcgcagagttcgaaggcctgctgcaccgccatcagaatgtgctggtgctggaattcgagccgcgtctcaaagacttccgtccacgggcactgaacgggcgcaccagtgaccagggcaagatgctgcaacgtttgcagtcggcgaaaaccctgcaagcgctgtacgaaatcagcgtgactgaaatccaggccatgaccggctacgaccgcgtgctgatctaccgcttcgaagacgaaggccacggccaggtgatcgccgaagcgtcagcgccgtccatggagctgttcaacgggttgttcttccccgcgtccgacatcccggagcaggcccgcgagctgtaccgcaccaactggctacgcatcatcccgaacgcggcctacgagccggttccgctgttgcctaagctgcgcccggacaccggccagccgctggatctgagctttgccaccctgcgcagcgtgtcgccgatccactgtcagtacatgcagaacatgggcgtgttgtcgtccatgagcatctcgctgatgaagggcgacaaactctggggcctgatcagttgcggcaaccgcgagccgctgctggtgccgaacgacttgcgcactgcctgccagaccatcggccaggtgctgtcgctgcagatcagcgccatggaggccctggacctgagccgccagcgcgaagagaaagtcgaggccctggcgttgctcgaccaagcgatgaagcgctcggcagagaacgtattcgacggcctggcccagcaaccgcagttgctgatggacctgaccttgtccggcggcgtggcgatcatcgaagacaaacaactgcaccgctacggcaactgcccggaaccggcgcagatccgcgccttgcacaagtggttgcaagcgcgcggcgagccggtgttttccagccataacctggtgtcggtttacccaccggccgctgagttccaacaagtggccagtggcgtgttggccatgagcctgcctaagcctgtggacaacggtgtgctgtggttccgcccggaagtgaaggagaacatcaactggagcggcgacccgaaaaaaccgctggacctggaaaactctgacgccggcctgcgccttcgcccacgcacctcgtttgaaatctggaaagtggaaatggccggcatctccaccaaatggagccacggcgaccactttgccgccaacgacctgcgccgctcggccctggaaaacgacctggcgcgccaggtgctgcgcgagcaacaagcggtgcgtgcgcgtgatgagctggtggcggtggtgtcccacgacctgcgtaacccgatgacggtgatctcgatgctgtgcggcatgatgcaaaaggccttcagctccgatggcccacacacctcgcgacgcatttcctcggctatcgacaccatgcaacaggccgccgggcgcatgaacgtgctgttggaagacttgctcgacacctcgaaaatcgaggccgggcggtatgtggtcaagccggtggcactcgacgtgacccagatcttcgaggaagcctattccctgctggcaccgctggcgatggataagggcatcgacctgtctttcaacgccgagccgggcctgcagatcaatgccgacccggagcgtctgttccaggtgctgtcgaacctgatcggcaacgcgatcaagttcactccgcgccagggcaacatcggcatcagtgccatgagcaatggcgaagaaattgtgttctccgtgcgcgactccggcgaaggcattgcaccggaacaactgccgcacgtgtttgaccgttactggacccagacggaaaacaacccgaccggcagcgggctggggctgtatatcacccaaggtatcgtccaggcccacggcggcaagatcgttgccgagagtgaagtgggtcgggggagtgagttccggtttacggtgccgaaggtgatcgacgactcgcatacctgagtgggtggtttgagggctgctgcgcagcccagcgcggggcaagcccgctcacgacaaggtccccttaaaccggcagcaccacaaccgcttccagccctccgccgtggcgttcggtcagggtcagggtgccgccgtgttccagcacaatcgcccgggcggtcgagagccccaagcccacaccgcccgtgcttttgttgcgtgagccttccaggcgatagaacggcaggaacacctcctcccgatgttcagccgcaatgcccgggccgcgatccaacacgcgaatcaccacctcgtcctgtgtgtgctgcaactcgatctccggcgcgacgccatagtggatcgcgttgtccacgaggttggtcatcacccgcttgagccccaggggcctgccgaaatacaccaggcgtggcggaccgtgaaaggtgatgtcgagcgcctggtcgcggtagtcgtcgatcagggtttgcagcaactcggccaggtccagttgggtggccggttccaggcgggcgtcgtcgcggaagaattccagggcggtgttgatcatggcctgcatttcatcgacgtcgcgaaacagccgctgctgctggtcggcgtcttcgatgaattccccgcgcaggcgcaggcgcgtcagcggcgcacgcaggtcgtgggagatggccgcgagcatttgcgtgcggtcctggatgaagtggcgtaactgcgcctgcatgctgttgaacgcaaggatcgcctggcggatttcatgaggccccaccggttcgacgggcggtgcgcgaaagtctgcaccaaagcgccgaacgccgtgggcaaagtcctgcagcggtcgcgccagtcgccgagtggccaccagggtgaccagtgcggtggagatcagcaccagcaataccacgatcacactgcgtgcgccctcgtccaggccccagctgcgggcaggcgcggtgaacatcagccaggaatgatcagccagttgcatcagcagcatgtagtggccattgccgtcgggccaatcggacggttcataggcttccatagggcggatcgggccgtcgagcaggtgctcgaaggcctgttctcccgactggaaatccgggtcctgcagcacgggcaaatcaaatgctgttcgctgcgccgaccacctcacgctgaacgcgtcgtcagccattacttctgccagacgcggtcgttgcgccggcgccgacgcttcgaccacgcgcaccaccacggcgattttttccagcaggccggtttcggtgagcggcggccgtgcccaaacccccgccagcttcacgaacagggcgttgaacgccaatgcggtgaacatcgcgatcagcaccgtcagggcgatccagcgggccacggtgtcgcgtgggcggcgactcatgagcgcgtcacgctgacggtgaattggtaaccgccgttgcgtaccgtgcggatcatcgccgggcgtttggtatcgaattccagcttgcggcgtaggcggctcacttgcacgtcgatgctgcgatcaaacgcgtcgtggctgtggccccgcgccaggttcaacaactgctcgcgggtcagcacgcgctgggggtgttcggcgaacaccagcagcaggtcgaactcgccggacgacaacgggatcatcacctggtcgggcgagcgtaattcgcggcgcgtgagatccagttgccagccagcaaagcggatcaatgggcgggcgacctcccccatcggcggtcgcgcttcacccgcacggcgcatgactgcgcgcacccgggccagcaattcgcgggcatcgaaaggtttgctcaagtagtcgtcggcgcccatttccaggcctaccacgcgatcgctgagttcgcccatggcggtgagcatgatcaccggcgtcgcatattgctggcgcaggcgctggcacagcagcaggccgttgtcaccgggcagcatcaggtcgaggatgatcaggtcagccggctggcgctccatggccgcccacagctcggcgccactggcagccgtctcgaccccatagccgtgttgcaggaaaaattttttcagcagggcgaggacttcaaggtcatcgtccacaatcaacaagttgctcaccgacggtcttcactgggtggggtcgaggcgctatctaaaaccattcggcacggtccgtcatatatttcaatcgtgcaataaagcgtcaacggcgcaataaaccagacatctttgcgcaaggtcgcactgccaggatcggcctcccttttttgcggagactgtgcccatgtgctcgctgacctacccccggcatctggcccgccaggccgtgctgttgctgacagtgtcttacctgacgggctgcgcaagcccggccccggtagagcccgcgactcgctgtgcgcaggtgaattacccggtgtatgacccggccgagccggtcaaccgcggcgtgttcgcgttcaaccgtgctgtagatgactacgccctggcaccggtagcgcgaggctaccgttacctgccggattttttccagcagggtgtgcataacttcgcgagcaacttcagcgagccggagatattcatcaacgacctgctgcaaggcaacccgagacggtcggtcaataccctggggcgcttcgccgtgaacacaacggtgggcgtggtggggttgttcgatgtgtcggatcgcctgggcatcccgcgccataaagccgacttcggccagacattcggtgtgtgggggatcggcaatgggccgattgtcgaactgccgttgctgggcaccagcaatagccgggatgcagcgggcaaggtcttgggcttcctggtttcgccactgggcgacagcgataccgtgcaaaccctgggcaccatcagcctggtgggcggcaccgtcgatacccgtgcgtcattgttgccgctcaccgacagcctgcagaaactgccggattactacagcgcgttgcgcaatgtggtggcggaaaatcgggcggcctttgtacgcgagggccaggaaggcgcgacatctcccgggctggacggttgcgccaacagcgcctcggatgacttctgaaagcactggccacccgtgtcatatcttgcagcagcgcgtttatagctgactcgtttcgccctctataaatttggcctcacttcgctgcaactggcgaagtagtcctctactcaatagaaggaaacatccatgctaagcgctatcaatcacacactgggcagctttcaataccctccactgcagcaggatgatgcagagccccagcgcaggaagcgcagcattgacgtcacacactcgcaactgagcgccgccgatcctgagagcacggcagccaacgaccgtcgcaaaagcggaggtgggctagacactctgggtcaaggcaggttgctctaacccgccttaatacgaagggcagtgcacggcccttcgtactgttgtttaacaaaaccatgacattcactgggctaaccttgccggttaaacccagcgtggaacccttacctgcatgccgcacctcgacacactgcccgccctattggccggcccactgctgcgccgcctcgaaccccggcgcctggtgttgtggctggtgggaagtcgagccctggaactgaccctgcagttgcatctacccgcccaaaccctggagatcaaccttgatcattgcaaggtcgtatcggttgggcaccatgcttttatccacttgatcgatgtgccattggacgaggccctgcccctggacgtcgcgatcggttacgacgtgttgttcgacaacaccggcatcgccgagtgggcaccccacctgctgtacgccaacacccactacccaagttttgttttgcacagccgtattcatcagttggtacacggctcatgccgcaaaccccaccacagcgccgatgaaggcctgctgtgtgtcgatcgcctgctggccaacgcctccactcccgccgaccgcccggccctgctgatgatgagcggcgaccaggtgtacgccgacgatgtggccgggccgatgttgcgcgcaatacatgcattgatcacacgcctgggcctgttcgatgaatacctggagggcgccgtgatcgacgacagcgcaagcctctacgggcatcgtgccagttactaccatcgtgccgacctgctgcccgcactggacagcaacgaaaccctgcgtgaacgcttctttggcggtgtgaaaaagccgatcttcaccagcagcactgccgacaatcacctggtcaccttcgctgaagtcattgcgatgtacttgctggtatggtcgccgacgccctgggaactgatcgcgcctgaagcgccgcaactgagcacagaagaactgcagcgctacgcccgcgaacaggtgcagctcgatcgattccgcgagggcctgccaggtgtcgcccgggtgtttgcccacctgtccaccttgatgatctttgacgaccacgacatcaccgacgattggaacctcagcgcccaatgggaagccaccgcctacggccacccgttctctaaacgcatcatcggcaacgctttgctggcctacctgctgtgccagggctggggcaatcagccggatgcgttcagcaagctggtcagccaaacccaggcgcttacctgccagccacaggccaatcacctggatgccgccgcccaggatgaattgatcgacgcgctgctcaagttccagcaatggcactacgtactacccaccaccccagccctggtggtactcgacacccgcacccgccgttggcgcagcgagttcaccctcaagcaaccgtccggcctgctcgactgggaggcgttgagtgagctgcaacaggagctgctcgaccatccctcggccattatcgtgtcacccgcccccatctttggcgtgaagttgatcgaaacagtccagaaaattttcagctggtgcgggcacccgttgctggtggatgcggaaaactggatggcccatcgtggcgctgcccaggtgatcctcaatatcttccgccactcgcgtacgccgggtaactacgtgatcctttcaggtgacgttcactattcgttcgtctacgaagtgctgatccgccatcgcaacgccggcccaaggatctggcagatcaccagcagcggcatcaagaacgagttccccccacgcctgctggaatggttcgaccgcctcaaccgttggctctactccccccgctcgcccctcaacgggttcacacgccgtcgcagcatgaaggtggtgccgcatattccagaggacgccgaagcgggcgagcggttatggaattcagcggggatcggccaggtgtttttcaacgatcagggccagcctgaagcgatctaccagcacaacgcggatgggcgggtgcggacaaggatgacagcgccgaagtaacttttcccacagacataaaaaacacgttcacgccagtcttgtagaaagatcacaagtgactgtttaaatcgcacggatcatttttacgctggtgggctgtgacattgtgctgctgcatggcttcatcaaaaaaagccaaaaaacacctgtggtagaactggacaccgcccggcgtcgtaaacgcaagctatgaggcacaacctatgaacaagcatattggctccaacttcgacgactttcttaacgacgatgggctcattgaggaagtgtcagcaggggcgttgaaacgtgtcatcgcctggcagttggcagaagccattaaagcccagaaaatcagcaaaaaagcgctggccgagcgtatgcacaccagccgtaccgcagtagaccgggcgctcgatcagaacgatgcaggcatgacattggcaaccctggcaagtgcggcaagggctctaggccaacgggtagaagttcggctcatacctgactcggatgcaatactgccgattacctgaagcggcatgccagacgctcaccgggaagccggactcttcagagacagccatagccattagccatcaacctttcgccgtacatctgccctattcaaagcgtccaagccccgttgtacagtagcgccagccacggagtatcggcgtcaacaacggcaggctttgcaggcctgcccacgcaaggaacgcgcagatgggcgatacctccgacaacaacccgttggaacaggacttctctcacttcaacgccgacatgctgcacaccgtgctggagttggtcagcgacgggatctgggactggaacgccaacaccgggttcgtctaccgcaacccaggctggtacgaaatgctgggttatccccgccacgcgctggagaacagtgtattcacctgggaaagcgtgattcacccggacgactatgcccaagtgatgaagttgtttgacgactacatccaccgtcgcgcccctcactaccaagccgaataccgctgtcgcaaaaaagatggcagctacctgtggatcgaagaccgtggctatgtgattgcgcgtaacgcagacggctcggtcgcacggatggtgggcgcccaccgcgacattcatctgcgaaaatgctccgtcgagcagttggagcaacgcaatcaatcccttgaggcactggtggccgagcgcacacgcgagctgtcgcgggtcaaccagcagttgcagctacagctggatgaaaaccgctcgctggccgaacgggatgccctgaccctggtcgccaaccgctaccgcctggagaaagtgctgctggaagaatgcgaccgcgcccaacgctttcgcctgccgctgacgctgatcgcgatggatatcgatgacttcaagccgatcaatgaccgttttggtcatggcgtgggcgatcagacgctggtgcaggtggttgaatgtctgcaacgctgtattcgcccaggtgatctgttggcccgatggggcggcgacgagtttgtgctggtcctgcccaagacctcgctggaaagcgcgaaggcactggcaaatagcatccgccagcaattgagcaacagtccgcacagccacgacttcagcgtcaccttgagcctgggtgtagccgaacgcgagcgggatgaatcccccgccgccctgatagcgcgtgccgaccaggcgctgtaccgcgccaaggcggcggggaaggatggggtctctgaataacagcccccgtgttaccgaaccggcggcgcgtactggatgccgccgttgttccacagcgcgttgagcccgcgcttgatcttcagcacgctgccctggccgatattgcgctcgaacacttcgccgtagttgcccacctgcttgacgatctgcaccacccaatccttgcgcagcttgaggtccttgccgtattcgccatcagcgccgagcaaccgcgcgacatccgggttcttggtggtcttggcctgctcttcgacgttctgcgaagtgatgcccatttcctcggcattgagcatggcgaacaaggtccacttgacgatgctgaaccactcgtcatcgcctttacgcaccaacggccccaacggttccttggaaatcacttccggcagcaccacgaactcgtccgggtgggccatcttgatgcgctgggcatacaggcccgactggtcggtggtcagcacgtcgcaacgcccggcttccaggcccttggcgctttcgtcggcggtgtcgaaggtgatcggcgtgtacttcatgccgtgggtgcggaagtaatccgatacgttcagctcggtggtggtgccggcctggatacacacggtcgcgccgtccagttgcttggcgccggtaacgcccagtttgttgttcaccagaaagccgatgccgtcgtagtaggtcacgccggtgaacaccaggcccatgcccgaatcgcgggagctggtccaggtggtgttgcgcgagatcaagtcgatttcaccggattgcagcgcggtgaagcgttccttggcggtcaactgggtgaacttcactttcgatgcatcgccgaacaccgccgccgccactgcgtggcacacgtctacatcgatgccggtcatcttgcccgtgctgtccggcacgccgaaacccggcagcccgtcgctgacgccacactggatgaagccttttttctggatagcgtccagggttacgcccgcataggcgctgctcaccagacccaatgcagcggtggtgccgatcacggccaaggtggttttgaatgggttcatgcaaggctctccctgtcattccttattattcgacgccccacagcccgcgccggtttatagtgctgccgggcagtatcaacggcttcgcaccgctgccacaaacgacctttaggcaaaggctccttccgatttggaatgaagtgcatgatttcaaaacgcttgaccccttcgatgaccgccctgcaatgcttcgaagccgccgcccgccacttgagcttcacccgcgccgccgaggagctgcacctgacccagagtgcggtgagcaaacaagtggcgcagttggaggagatgctctgccacaacttgttcgaccgggtgcgccagcgtttgtacctgtcaccggccgggtcgctgtacctggccgaagtgcacaagatcctcacacaggtggacatctccagccgttacatcctcacctacggcggcgaaaccgaagtgctgcgcatcgccacccagccgaccttcggcgaccgttggctggtgcccaagctcaaggattttgcggcgcaacatccgaacatccacctggatgtgcgcaacgagctggagccgttcgatgtgctacaagccaaggcggatatcgcgtttttcttcggccagggttcatggccgggagcaacctgcatcgagctgttccgtgaggcggtggtgccggtgtgtgcgccgggttttgtcgccgaaggcagtgatgcttcgtcgcgccacaccctgctgcaatgcacctcgcgcccggaggcctggcatgaatggttcctggagcagggcctgcactcacagaacagctaccacgggccacgattcgacacgttctacatgtgcattcgcgcggcgcaatcgggctatggcgtagccttggtgccgcagtacctggtggccgaagaactggcccagggcagcctgatgattccatgggactatgcgatgcccagcagcggcgcacactttatcgcccatgccgaacatgccggcgagatccccaaggtgaaggccttcctgagctggatggtcgactatgtgagcgcacatcgcgattttcagtcatgacccggcgactttatttcgtttgcgacaagggtgggcgcccggcttagataaaaagacgcccgtcactgtcgagtctgcgattcatgagccacgaaaccatcagccagtcgatttccatcgttcaccccatcagcctcaaccacggtaaaaatgccgaggtctgggacaccacgggcaaacgctacatcgattttgtcggcggcatcggtgtgctcaacctcggtcattgccacccgggcgtggtcgaggcgattcgtgaccaagccacccagctgacccattacgcgttcaacgccgcgccgcacgcgccctacatcgaactgatggcgcggctgacggcatttatcccggtgacctacccggtcagcggcatgctcaccaacagcggcgcggaagcggcggaaaacgccctgaagatcgtgcgcggcgccactggccgcacggcagtgatcgcctttgacggcgccttccacggccgcaccctggccacactcaaccttaacggcaaggtagcgccttacaaacagaaggtcggtttgctgccgggaccggtgtatcacctgccctacccgagtgccgacaatggcgtgacttgcgccgaagcgttgaaggccatggagcgcctgttcagcgtggaaatcgacgtcaacgatgtggcctgtttcatcatcgaaccggtacagggcgaaggcgggtttctcgcactggatcgcgaatttgcccaggcgctgcgacgcttttgcgatgaacacgacatcctgctgattgccgatgaaatccagtcgggctttggccgtaccgggcagcgcttcgcgttctcgcgcctgggcatcgaaccggacttgatcctgctcggcaaaagcatcgccggtggagtgccgctgggcgccgtggtcgggcgcaaggcgctgatggacaacctgcccaaaggcggtttgggtgggacctattccggcaaccccatcgcgtgtgcggcggccttggccacgctggacgcgatgaccgacgaacacctggagacctggggcgcacagcagcaacacgccatcgtcagccgctatgaaagctggcgcgcgcaaggcctgccgtacctggggcgcttgaccggtgtcggcgccatgcgcggcatcgagctggcaaacgccgacggcacacccgcaccgcaacagctcgctcaactattaagcctggcgcgggacgccgggttgttgctgatgcccagcggtaagtcgcggcacatcatccgtttgcttgcgccgctgaccatcgagcctgcggtgctggaggaaggcctggatatcctcgaggcctgcctcaagcagttgggctagtaacgcgcatccacgggtctgccgccgctcggccagtccttgaccttgtcggggaagtccgggcgcggttgacccgagaaatacgccgccacgtccaccgcttcctggtctgacaaaccgccctgccccagcgggaatttctcgtgaaagccgatcggcatgttgcgtttgacgaacgctgccgccgtgtaggtgcgcgccatgccggcgccgatgttgaacgattgctcgccccacagcggcgggtagatcagctcgccatcagcgcgtgccaggccctggccgttgtcgccatggcacaccgcgcactgtttggcgtacacctgcttgccattggccaggtccggcttgagcgccgggtcgaccttgcctacgccgcgcccggcgactttgtcttcgggacgggtgttgtttttcatccagtcgaagtacgcaaccatcgcctgcatatccgccgattgcggcggcagtggcgtgccattcatcgagcggcggaaacagccgttgatgcgctcttccagggtcaccaccttgcccgcacgcggcgcatagctggggaaaaacgccgagacgcccacgaacggcgaaccatccgccaccgtgccggcattgaggtggcaactggtgcagttgagcgagtttccgacattggcgggcaacagcgctttggtttgcaggtgcaggcgcatgccacgaatgacttggtcggcattcggggcagcgagcagattggccagtcgcggggtttcaaacgccgatgagtccgtggtggccgggttgagttggtcacgcagttttttcacttgggcagcgctgatcggcgtgccttcgttgccccaacgggtgcgcacgaatgtcaggatttcggcgatttcctgatctttcaaacgggcgaaacccggcatggtgtagacccgtgggtgcgtcgccgtctgtgcggtctcccaaccggtgagggtgatgtgcagcagtgaagtcgggttgctggacgcgatgctcgggttgcccgccagggatgggaacaggcctttcacgcccgcgccatcgctgcggtggcagtcgctgcagaactgcatgtaacccaggccaccgcggctggtgaacaagtccgccgggggcgcggcgggcgccacggccacagccggcatgggcaggtcgtccttgccgggcggcagggacttcaggtaacgggcgatggccgtcaggtcgtcgtcactgaagtgctgggtgctgtggtgaatcacatcagccatgttgccggagaccgtggcaaagcggttctgcccggtcttgagcagttgcacggtgtcttccacggtccacaggttgcgcaggctcaaggcgcgccaatgctcgactgtttcaccggccaggtaatgctggccactgcgccccgcgtcgctcatggctttttcctggaaggcaatgccccgtggggtgtggcaggagccgcagtggcccaggccctggaccaggtaggcgccacggttgagctgttcatctcgcgccggatcggccaggaagggctgtttatcgagaaaggcgaaattccacagcgccaggccccagcgctggttgaacggaaagcccatgtccgcctcaagattggcctgctgcaccggctcgacgccttgcatcaggtagacgtacagggcgcgcatgtcggtttcgctcatcttggcgtaggacggatacggcatcgccgggtacaggttcatgcccgtcggcgttacgccttcgcgcatgacgcggtcgaactgttcgaaggtgtagccgccaatgcccgtctcgcggtccggcgtgatgttgctcgaaaagatcgtgcccatcggcgtgctcaactccaggccgccggccatgaccttgccttgcttggcggtgtggcaggcaatgcagtcacccaattgcgcgacgtatttgccgtgttcgatcagaggcgtgtcgggggtgttggcgtgcaggggaaaagacaagcagagcgtcgcccccagcaaggccaggcgggagagggaaagcgccatcgtattagtcctttgacaacctggcgtggggcggtcccctgggcgcaggtgtgtggtcgtttttatgggttcatcaggcctctgtgttgtaaaggatatgcgggcgaaggatgttgatatgggtcagggcgaaatcgatggcaacgacaggtacttgaccgttgataagttgccctttgaagccccgtgcacaattctgtaggtttcagccatcgaacgaggagaccaccatggagaccgtcacctacgccaacgcccgcgcccatctttccgaaacgatggatcgggtcaacgaagatcgcatcccactgctggtaacccggaaaaaaggcgagcctgtggtgatgatttcgttgtcagagttcaacgcgcttgaagagacaggctatctgctgcgctcgccagaaaatgccaaacgcctcatcagctcagccaacagcctgcgggcccgcaaagccaaagtagttgattgaataatgaaaatactcgcttcccctgagggcagaggcgactactgaatgaatttacccgcaggaacccaccttgacctgacctccctcccccctgaaaatgcccgacgcttttttgtcctcgtttactgaagtagtgaaatttcaatgtccgattcttacaccgaacactccgccaccgaagaatccgtcgtcgccttgcacgccaaagccgaatacgaaaacgccatcaatctttcacagcatctgcctgcggccaagatcatcagcgagatggtgctggacgctttccacacctccaaggaaagcgaccagatccgcgaactgcgcgtggccatccgtcaggcccacgatgccttcgacgacgacaaggcctacgacctgatgggtcagctcaagcagctcaaggatgccgaggccgccgacaacgctgccctggaaaacttgagcagccagttctccatcagccgcatactgtccagcttcaaggacgaccccgagttccaggagctggtctacggcctggcgcttaaagtgctgaaccagagccaccaggccatcagcaacccgagcgccggcaagagcaaggcatcccgcccgaagaaagaagccgaagtgtttgtgatcagcaaggatggcatcagcgtcaccctgccgctgcgcacgccgcgttcgaagcttaacgttgaccgtgaggcgttcgagttcctgggcttcagctttgtgggtgaaggcgatgaagcggagctggaagtcgagagctttgtggataacaccggcgccgagcagcctttgagccgcaagagtgtgattactgcgttgcagcagcagacggcgtttgatgggtacagcatcgcgcagcagtaacccttaatcccagccctttcaaggtctttaggtagaacaggcgaaaagtactctgtggcgagcgggcttgtcccgcgttgggttgcgaagcgacccttgaaggaggaatgcgctgagacaggcattcttcggccgcgggtttcagggctgctgcgcagcccaacgcgggacaagcccgctcgccacagttgcagtgttcgtcctcagccagatagggtcggtttttcaaagaccttgaaagggatgagccttaatccgcaacactactgggtaccgctcccacgtttgatcggcgtcgcgtcaactgacctgctgcgcaaacacctcgcgaaaccgcgccatatcctgcttgtctcccaccgtcacccgtacccactgcggccagcttttaaacatccggccgatcagcacaccgtgtgccgccagcttctcgatcacctgctccgccggctgtttcacgtcgatcatgaagcagttggcctgtgacgccgtgcaggtgaaaccacgccccttcaaccaagccacagtttcatcacgcagttggctgttcagtgccttgcgttgcggcagcagtttcacgtcttgcaggctggcaaggccacccagcaacgtgctgcctgccggcacgttgtcaccgccaaacacggccagccgctccagcagcgccggatgaccgattgccaggcccaggcgcgcaccggccatgccgtagattttcgagaaggtgcgcagcaccagcaggtcgtcgtggtccttgacccaactgaccacgctgggaacatcggcaaagtcgatataggcctcgtccaccaccagcacgctgcctttgggtttgtttgccaaggcctggcggatggcatcagtgggcgtgacagtgcctgtagggttgttggggttgcacagatagagcatgccagcctggggatcggcggcgagcatggccgggatgtcgtgggcgtggtcggcgttgaggctgacttccttcaccgaggccctgttcgactcagcggcctggcgtggcacttcataggatggcgtggccatcaccagaccgcgggtttcactggtgaatgccagcactgcatagcgcagagcagccatggagccggcaaataccgccacctgttcttcgacaatgccctgttgctgggcaaacagcccggccagggcgtacatgtgtttgtaggggtaacgcccggacgttgcgattcccttgtgcatggcttcgcgggcagcccgtgagggcccgtaggggctttcgttatagttgagcagcaccttgtcaggcttggtcggcggcgggctggcaaccgcccaatcgaggcgtcccagcagaggcagggcggcgcccagggcgagaagggaccgacgacttacgctgaccatagggctactccttgtaggcgggtgatggattcgcacagcacgtactgaggggtatgacgataaacgcagccggggatttaaaccccgtccaagaaaaagccccgcgcttctctcgaaggcggggctttttcactgcgggaccactcagtgagcgtaggtcagcagcagctctttcggtacttggaaatccagggacatcatcacgctcagcgcggtgatggtgaagatcgagaacacgaacagcttgcgtgcccagacggtgtcatccaccgccttgtagccggtccaggccatgtacaaccagtacatgcccatggcggcagcgacggcgaggtagctcatgccggcgtagccactgaaggtcaacatcaaggtcgccacgaggaaggccaggatgtacagcaggatgtgtttcttggcgacctggataccacgctttaccggcaataccggaatcgacgcagccaggtagtcattgaagcggaaaatcgcgatggcgtaggaatgcggcatctgccacaggctgaacatcaccagtagcgtcagcgcggccatgtcgaagctattggttacagccacataaccaatcaccggcggcatcgcccccgacagactgcccaccagcgtgccgtgaaccgacttgcgcttgaggtacaggctgtagaggccgacgtagatgacaaaaccgatcacggcaaacagcgccgccagcgggttggccaccttgtacaacaacgccacaccggcaacacccaggacggtcgcgtagatcagtgccagtttcagggagatgaggccctggaccagcacgcgattcttggtgcgctccatcttgatatcgatgtcacggtcgatgcagttgttgaacacacatccggaagctaccaccagggacgtaccgatcattgcagccaggaagatggccagatcgacatgtcccttggaggccaggaagaaaccgcccgccacagaaagcacgttaccgaaaatgatccccggtttggtgatttggataaagtgcttaagcgacatcgggtcttacctcacttcgccatcatgaacgtatggatgctgaacatgatccatatcgacaggccaaccagcagtacgattacgatccctgcgaacacgaacgcaaccacgttgtcgcgctgctccttggaacggtccaggtgcaggaagtacaccaggtgcaccagaacctgaatcaccgcgaatgccagcacgatcatcaaggtgatcgacttcggcagggtcgggtacatcaccagaccgaacgggatgagcgtcaggattaccgacaggatgaagccgatggcgtacgacttgacgctgccgtggcttgcatcatggctgtcatggtcatgggagtgtgcattagccattacagagtccccatcaggtaaacaacggtgaagacgcagatccagaccacgtccaggaagtgccagaacaggctcaggcaggtcaggcgagtcttgttggtgttggtcaggccgtgcttattgacctgatacatcatcaccgccatccacagcaggccggcagacacgtgcagaccgtgggtgcctaccagcgtgaagaacgcggacaggaagccggaacggtgcgggccgtagccttcggagatcagcaggtggaactcgttgatctccatgccgatgaagcccaggccgaacaggaaggtcagggccaaccagctcagtacgcctttcttgttgcccttgtagaaggccaacatggcgaagccgtaggtgatcgaactgaacaacagcaaggcggtttcgccgagcacgtaaggcagttcgaagatgtcgtggcccgacgggccacccgctacgttgtttaccagtaccgcgtacaccgcgaagatcgacgcaaacaagatgcagtcggtcatcaggtagagccagaaaccgaaaacggtcatcggccccgagtcgtggtgatggtcatcgtgcccatggtcatcgacatgggcgtgtccagcattggtcactaagttcgacatggtttaagcctgttccaacgaggtttcaacacggttggccgggatcttcttctcggctaccaggcgagcgtgctgctcggcttcgatgcgctcgatcgtctcgaccggcaccatgtagccttgatcatcacgggcagcgtgaatgatgaagtaaccgatagtgcccaccaggctcacgattgccagccaccagatgtgccagatcatcgcgaaaccgaacacggtcaacagcgcgcccatcaccacgccagtggcggtgttgtttggcatgtggatcggttcatagtgcttcggacgctggtacgcagtaccgtcttccttggcttcggtgaacgcatcaatggtgttcgcggtagggatcacggcgaagttgtagaacggcggtggcgacgaagtcgaccattccagggtgtggccattccatgggtcgccggattcgcaagcgttctgcttacggtcacggatactcacgtacagctggatcagctggcaggcgatacccacagcgatcatcaccgcaccgaacatggcgacgtacaggtacggcacccactcagggttggtagtggcgttcagacgacgggtcatgcccatgaagcccagagcatagagcggcatgaacgcgacgaagaagcccgagatccagaaccagaatgcagccttgccccaaccttcgtgcagcttgaagccgaacgctttcgggaagtagaaactgaaaccagcgatgtaaccgaataccgcaccaccgatgatcacgttgtggaagtgagcgatcacgaacaggctgttgtgcaggacgaagtcagcacccgggatggccagcagtacgccggtcatgccgccgatggcgaaggtcaccatgaagcccagggtccacagaacctggctggtgatacgcagacggccatggtagatggtgaacagccagttgaatagcttcacccccgtcgggatggaaatcagcatcgtcgccagaccgaagaaggcgttgacgctggcacccgaacccatggtgaagaagtggtgcagccaaaccatgaagcccagtacagagatcgcgcccgatgcgtagaccatcgagtggtgaccgaacaggcgcttgccggtaaaggtcgagatcacttcagagaagataccgaacgctggcaggatcaggatgtacacctcagggtgaccccatgcccagaacaggttcacgtacatcattggattgccaccaagttcgttggtgaaaatgtggaaatccaggtaacggtcaagcgacagcagcgccatggtagcggccaggatcgggaacgaagccacgatcaggacgttggcccaggtgcaggtccaggtgaagatcggcatgtccatcagtttcatgccaggggcgcgcattttcaggacggtggccaggaagttgacccccgtcaatgtcgtcccgagccctgataactgtagcgcccagatgtagtagtccacacccacgccagggctgtactggatacccgacaatggcggatacgcaacccaaccggtcttggcgaattcgccgacgcccagggatacgttgatcagtacaacaccggaaaccagcagccagaagctcagggagttcaggaacgggtaggcaacgtcacgggcaccgatctgcagcggcaaggcaaggttcatcaggccggtgaagaatggcatcgccatgaagatgatcatgatcacaccgtgggcggtgaagatctggtcatagtgttcaggtggcaggtagccaggcgaaccctcggtggccatggccaactgggtacgcatcatgatggcgtcggcaaaaccacgcagcagcatgaccatggcaacgatgacgtacatgacaccgattttcttgtggtcgacggacgtcagccactcggtccacaggtaggtccacttcttgaaataagtgattgctgcaaacagtgccagaccacccagcgcgatcatggcgatggtcaccatcacgatcggctcgtggaacgggaccgcatcccaacttaatttaccaaacatcgtttactcctctgccccagcagttgaatgcgagcccgtgtcagaaccttcaaccacggccacttctttcttctcgtgcttgaccggcttgcctggcttcataccttcgtacttgtcgacgattttctgaaacaggttcggctcatacgtggagtacagggcgactgggttgttctggcttggtttggtcagggcatcgtattcagcttgatcaagctgtttaggtgcggccttgacttcggctacccaggcgttgaaatcttcctggctcgtcgagatcgctttgaatttcatgccggtgaagccagcgccgctgtagttcgcggagatgccttccatttcagctttttcgttggcgatcaggtgcaggcgggtctgcatgcctgccatcgcgtagatctggccacccagggctgggatgaagaacgagttcatcacggcgtcggaggtgatccggaaattgagcggggtgtgctcggggaacttgatctcgttgaccgtggcgatacccaggtccgggtagatgaacagccacttccagtccagcgcgaccacttcgatgttgatcggcttgacgtcggactccagcggacggtacgggtccagctcgtgggtcgacttataggtgatgtaacccagggcgatgatgatgaggatcgggaccagccacaccgcgatttcgatcttggtggagtgcgaccacttcggcgcgtaggtcgcgctggtgttcgacgcgcggtatttccaggcgaaggcgaaggtcatgatgatcacagggaccacgaccagcagcatcagcagggtggcggtgatgatcaggtttcgttgatccagaccgatctgtcctttcgggtccatcaaggtccacttgcagcctcccagcattaacatcatgccaagcagcggcaaaaagcctagtaatcgggggtacctgtttttactcatctcacgacctctaaagcagcttgcgcaatgcagttgggttttgatcgccaacacttcaccctgccaagggttggcatttctcttcgattgaataagagcctgcccatcacgtcataagggaacgtttcacggacctgcggtgagttcttattcgatttcgtggttaaaggccttgttacagaccaattccatttggtgcggatagttgaaaggctgccggaaccttggggtcgcacagagccatccatctgcccttcgaccgctccggtgctcaaatattgaacagcaccggacattcagtgcgggcgattgtagttagctagcgatgtataaaccatgtcttataaagaaataatttttatcgattacagcaataatccttcaccattattgcaacggttcgcgatcttatcgcgttcgattctcaacaaaaaccacaaaaaatgccgtgttatagggcagcctgccgcaccccttaccgcgtgtaaggggctgccaaaccgatgcaaccccccataaaacaaggcattcggacatcaccgaatccctggcgcggcgcgaggtgcgcggccttcccggcgccccgaactgacagcacatcttggcggttttatgcaaatttaagcgggggtttggcgggtcagaaacgtcctgcggcggcttccgtgtgacaacatgtcgcacaccgcgcgcagccaaaattgtccggcgtcacgttccgttcacaaatccccacacgcaaaaacgccccggccttcatgaataagcgccggggcgtttgagtgaatgattcaggctttgcgctggcgattgcgatagatgcccagcggcaccaggatcacggtcagcacgaaggccaccaatgcccattgcgccagggaaagccccagtacgggtgggtacggtgtgctgcagaagccatcgacctggaagcccagagggaacaccttggccagcggcaggtcatcgacgatcggttgcagcacatcgatgccgcagctgacctgggggaaaaactgggtgtacacgtgatgaccggcggcagcgacaccgccaagggcgctgagcaccaccaggccctcgaacagcgtgatcgcaccttttttacgcatggccgcgccgatgaacgcgaagatcgcgatcaacagcaaggcatagcgctgcaggatgcacaacgggcatggcgcctcgccgagtaccacctgcatgtacaacgcaccgccgatcagcgccaggcagatgatgcccagcaacaccagaaagcgccgctccctgcctaaacgcaattcgtcactcatccccgtatccctttgtttggttgtgccaatggccgcaagtttacacacaggccaccgtttaaacagaggggggttaacagcggattaatccagagaaatagaccgctgtatgtgggagggggcttgcccccgatagcagtggatcagccagcttatgtgcaaccgacctaccgctatcgggggcaagccccctcccacacctttgaccgccttattccagggcagcagccgggccaaagaattcgtagcggctttgctgctcgggtacacccagggccttgaggtggcgcttgatcgcggccatgaagcccttaggcccgaggaagtaggcgtccaggtcgcgctgctcgggcagccaggcggccagttgttcctggctgagcaagcccaccttgtccgccgccgggcttacgccatcgtcttcggtgtagcagtagaagcgcttgagctgcgggtgcttcgccgccagggcgtccacccagtcacggaacgcatggacgccgccgttacgtgcgcagtggatgaagtgcaccgggcgctcggtggccagcgcggcttcgagcatcggcagggtgggcgtgatcccgaccccgccgctgatcagcaccagcggtttgtcgctgaccgccagggtgaactcgcccgacggggtgaacaggtcgatggtcgcaccgacatgcagctggtcgtgcaggtagttggacacccggccaccggcttcgcgcttgacgctgatgcgatacataccgctatcggtcaacgccgacagggagtagttgcggcgcacttcctcaccgtcgagcaccagcttcatgccgatgtactggcccggcgcagcggcgaggatcggaccgttgtccacaggagcgaaatagaaggagatgatctcgtcgctctcgaccacgcgcttgaccacaataaacggccgcgccccacgccagccaccgggcgcctgggccttctcgtcgtagatcaccgcttcagcgccgatcaggatatccgccaattggccgtaggccgcaccccaggcactcatgacctcaggggtcgcaatctcactgcccagcacttcggaaatcgcccgcaacaggcaggcaccgacgatcgggtaatgctccggcaggatctgcagggccacgtgcttgttgatgatcttggctaccaggtcgcccaactggtcgagctgatcaatgtgtcgcgcatacatcaacacgccattggccagggcacggggctggtcaccgctggcctggtgggcctggttgaacagcgggcgaacttccgggtactcggacagcatcatgcggtagaaatgggtgatcagcgcttcaccgccgctttccagcaggggcacggtggatttgacgatggcacggtcttgggcactaagcatgggagcctcctgggcttctttactgattgcctttacctactcagtattcgtgccaactaataaaccgttaattttcaataacttaattaatgtgtagtcagtatgacttcctacaccttatagtcattaggactacaaggagtcattatgactgcgcaatcgctgctcaccaccctgctgcccctggtcgccgacctgtcccgcgaactgcccgaaggcgagcgttaccgccgcctgctgcaagccatgcgcgccctgctgccctgcgatgccgccgcgctgttgcgcctggacggcgagtggctggtgccgctggcggtggacgggttgagcgccgacaccctgggtcgacgcttcaaggtcagcgagcacccgcgctttgccgtgctgctcagcagccccggccccacgcgctttgacagcgacagcgaattacccgacccctacgacggcctggtcgagggtctgcacgggcacctggaagtacacgattgcatgggttgcccgctgttcgtcgacgaccagccctggggcctgctgaccctggacgccctcgacaccgagcgtttcgaacgcgtggaactggacgccctgcaggcgttcgccagtctcgccgccgccaccgtgaacgtcgccgaacgcatcgaacgcctgaccctgcgcgccgaaatctaccgcgaggccagcggccagcagcacaaggaaatgatcggccagagcaaaccccacaaacgcctggtggaagagatcaagctggtgggcggcagtgacctcaccgtgctgatcaccggtgaaaccggcgtgggcaaagaactggtggcccaggccatccacgccgcttcgccccgcgccgacaaaccgctgatcagcctcaactgcgccgccctgccggaaaccctggtggagagcgagttgttcggccacgtacgcggcgcctttaccggcgcgttgaacgaacgtcgcggcaagttcgaactggccaacggcggcacactgttcctggatgaagtgggcgaactgtcactgaccgtacaggccaagctgctgcgcgtattgcaaagcggccagctgcagcgcctgggctcggacaaggaacaccaggtggacgtgcgcctgatcgccgccaccaaccgcgacctcgccgacgaggtgcgcaacggccgctaccgcgccgacttctaccaccgcctcagtgtgtacccgctgcaggtcccggcgctgcgtgagcgcggacgcgatgtgttgctgctggccggtttcttcctggagcagaaccgctcgcgcatgggcctgggcagcctgcgcctgaccagcgatgcccaggcggcactgttggcctataactggccgggcaatgtgcgggagctggaacatttgatcggacgcagcgcgctgaaagcactgggtaactgtcgcgagcgtccgaagattctcagcctgaatgcacaggacctggacctgcccgatgtcagcgcagcgctggtcgaagaacccgccgaggcggtcgccctggtgaccggcgacctgcgccaggccaccgagcagtatcagcgccaggtcatcagcgcctgcctggagcgccaccagcacaactgggccagcgccgcccgcgaactgggtctggaccgcgccaacctcgggcggatggccaagcgcctgggcctcaaataacccaggcaactggttcacatgtgggagggggcttgcccccgatggaggtgtgtcagccagcccatctagcattgacccactgccatcgggggcaagccccctcccacactagacctgcttcgcctgaaaaaccgggctcgctggcttgggcttacgaaagaccaacacattgcccagcatcaccagcaccaaccccgccaacgccggcgcggtccactgatacccctcggcaaacgccgacacattcagcgccaccaccgggaacagcacggtgcaataggccgcacgctccggccccatgcgcccgaccagcgtcaggtacgcggtaaagccgatcaccgaacctggaatcaccaggtaccccagcgcgccgatataccgcgcgctccagtccatctcgaagggaatcccgcgcaccgcgcagtaagccgccagcatcgccgatccataggccatcccccaggcattggtggtcagcggcttgagcccggccttctgctgcaggctggacagcatattgccggccgagaagcacatcgtccccagcaacgccaagcccaggccaagcaaagtctgcgggctggcggtgtgccctaccagctccggccagaacagcaggcccaaccccgccaggcccaggccgccgcccatcaacacattgcgcgccacccgctggccaaaaaacatccgggcgttcagcgcgttccacagcgtggccgtggaaaacaccaccgccaccaacccgctggggatccattggctggccgtgaggaagcacatgaagttcacgcaaaacaggcacagcccctgggccagacagatcaggtgcccgcgccggttcatcacctgcaacctgcggctcaccagcaacagtgcaaacaacaccagtgctgccaggccgaagcgatagacgatggacacaggaatcgccaccacgcccaactgccatttgagggcgatccaggtggtgccccagatcagcacggtgagtaaatacaggaaaagattcatagcgggctccatcggttgagccacagtgtggcccccagcctgggatgcgctcttgcacaatcttgcgcttttgtcggccaatgggatcacagcaaccagcgcgcggagtaggatgcaaggcgtcagagagtacgaaccatgccagacctggaatccctgcaagtcttccaagcgcttaaccgctcgcccaacgcacgcctcgaagcctgcgccgagctcggtgacggcttgtctgcagcgctatggagcaaccatcacgacgcgcaggactaccaggcccccagccatcacacgttgtcctgctacatcggcggcggcaccggcacctttcgacgcgaccaacccggcaccaagggcggccccgacaaactgtgcatcctgcccgccgaacaccagtcggcctgggtgatcaacggcgaaatccgcctggcccatgtgtatttcagcccggagcaattcgcactcggttgcgtcaccctgctcgaccgcgaaccgcgcgccctgcaattgcgcgaaagcacctttctggaggacgccggccaggcgcgacgctttcatcagttgatagcgctgaactggcacgaacccgccgagcgcctgctgactagcagcctggcccatgaaatgctcagccacacgctgctcagccaagtgggcgcacgcgacgggctgcgccttaaaggcgggctggcggcgtaccagcggcggctgttggtggagtacatcgaccagcacctggaagacccgatcagcctaggccaactggccggcctgtgcgcactctcggaataccatttcgcgcggatgttccgccaaagcttcggcctgccgccccatcagtacctgctggcgcgccgcctgacccgcgcccaggcgctgctgcgcagcggcgcgctgcccttgagtgaagtcgcgttgatctgcggtttctccagcgccagccacttcacccatcgcttccgccaggccatgggcgccacgcccggcgaataccgccaagccttctacgcctaggtcatcaaccccagggtcttggccttggccactgcttgcgtacgccgttccacccccagcttgctgtggatgcgccgcgcatgggtcttgacggtgtgcagggagataaacaggcggtcggcgatttccaggttggagttgcccagggcgatcaattgcagcacttccagctcgcgctggctcaagggattctctgccgcgcccgacacggccgcctgaggttccatgcccaactcactgagcacccccggcgagcgcaatcgcagttcgcgaatcgcttgctgtacctggcaacgcgccgccagctccagcccggtttgcagcgagcgacgcgccaggaccgagtcgcccatttgccaagccacctcccccagcaccaggtgcagttcggtttccaggcagagcatgccgcgttgatgggttgcctccagcaaagccgtcagccgcgccaccggttgctcggcgcagcccagcttcacttccgccagcaccagcaggtattccaggcgcgggatcagttccagggtggccggcggcgcctgtttggcctggggaccacgaaagtggcgaagcacacgacgcaccgcttccaccgtcaattcggcgcgcccctgctgcaaccagaaatgcccactgaccaacagcaacactgcgcggtacaccgtgtcggggacctggcgctgttgcatcaagcgttcggcctcgcgcagttgcacaaaggcctcggcgtagtcgccacggttggcggccagcagggccaggccgagaaacccgtagagcacgcgcttgtcctggctgtgcaggcacatcttcaaaccggtctcgaagcactcggcggcaaggccgtcctggccttgacgcaacgccaggtgcccacggcgcagggcgatgcgccccaccagcggcccggctttcacacgttgcttgatcaacatcgcctgcacactctccagcaggctctgcgcccgatacggggcgccgcgctgctccagcaactgcgcgtgatccagttcaagcaacgcctcaagcagcaacgacccatgggcgcgggccaggcacaacgcttcgcggctcagcgcctgggctacgtccagttcgccgcgcagcagtgcttgctgagtgaggcccgacaggcacatcagccgcgacgtccaggcgctgtcgggcaaggcttgcagcgcttcgaggaaatgcgcgcgggagcgttcggcatcgccgcccaagtgcagcagccagccccactgtgcctgccagcgcgccagcaggtagcgttgttgcgccgccgtcggttgcggcgcgaaccgtgccaactggtcgatacattgcgcggcctggtcgaagcgcccggcgaacagcaacgccgccgtcaccagccccaccagttgcgccgagccgagcatcaactcttcaccatgctcttcatgcaaacgcagcagcaatacggcgttctgctggcggaacaggtcttcgaaactgaaatgctgcaacaggctgactgccacctcgtactcttcggccagcagcgcgtgctcgaacgcggcctgccagtcctgttcggcggtgaaccactggcaggcacgccgatgccaggaacgcttggccggccaggggtcatcgcgtatcagccgggcaagcggcgggaaaacctgcaaccactcggtatcttcccacggctggataaaggcgccgagcgcctgcaactcgcgcaggtagtgatcaccgtcgccaaagccgaacaagtgctcgcacaatcccgggttaaagcgtggcaggtgggccagcacgcgccaggcttccgtcagctcgggcggcaaggtgctgaagagttcgtgctgcaagtaatcgagcaaggttttctgcgggtggccatcccccagcaacgcaatgcgcacgccggcgcaccaaccggcgctgaattgccacacgctgtccgctgacggccccagcgggagcagttgctggatttcttcaagggtgaacgccaactcggcgcccccctccagcaattcatcgtcgagcaacaggcgcggccagttgcaggctggacggcgccgcgcgcccagccaccaggtcagcgaagggctgctcgccgtgagcaggcgatcgagcaaggcatcggtttcgggggtgggcaagcgacagaaatcatcgaggaacacccatgccgatgttggccagcggccaagatctgccagcagcgtggcttcatcgctgaacgccaagccgaggttttgcgccaggcgccggcaaaggtcgagggggctcagggcgacaccattgagcggcaaccagtacacctggcatcccgctggcgcctgcaacgcacattcggccagcaacgcactcttgccgctgccgccgggggcgcacagcaacttgaccctgaccggcgctgccagcaacggcccggccaggcgtgggcgcaacagatggtgggcggacagccgaggcatgaatccaggacggtccagacagcgtgtcatggcggtcattgctgcatcctgcgttcttattgttatgcaacgtggcgtctaccctagtcctgtggttggtggttgttgaagaagtattcagcggggtgattggcgggcataaaaaagccgggagcccgaagggtcccggccaggtcagagggtgatcagcgcacgccttcggccctcagcgcagccggggtgtaatccgccgccttggccgcaaagccaaacacgaagctgctcttctcctcgttcttcatgcccagcgcgatgtagcgcccggcgatgatgtcgtacagggtttccacggtgtaggccggggtctggtggtcgtagtagaactgcgcatggccttcggcgacccgccacagttggccacggccgtcatagtgatccaccagcgccacctgccagctgtcttcgtcgatgtacatgtggcgcttggcgtagatgtgccgctcactcggcttgaccgtgcccaccacttcccacacgcggtgcaactcatagcgggtcaggtcctggttgatgtgaccggccttgatgatgtcgtcgtacttgagcgttggctggtccagcctgtagctgttgtaagggatgtacatctccttcttgcccaccagcttccagtcgtagcggtccggcgcgccggagaacatgtcgaagttgtccgaagtacgcaggccatcggaggcggtgcccggtccgtcgtacgccacttgcggcgcccggcgcacacgacgctgcccggcgttgtagatccacgccaggcgcggttccttcacctggtcgagggtttcatgcaccagcagcacgttgcccgccaggcgcgctggtgccgtcaccgactgtttgaagaaggtcagtacgttggccgctttggccgggtccatgtcggggatcagttgcggcaccgctacttcttcctcaaagcggatcggcgtgtagctcccattggtctgcggggtggcctgggtgatgatgcggcgcaggttgccgccgtggtaacgggtgatgtggttccacagcacctccacgccattcttgggaatcgggaacgcgtagtagcggttgccggtgaacccttcgaggccgttgccatcgttgatcggcttgacgttcaacgcgctgcgcttgatcgattcatagatctccggcggcaggttgacggtgcggtgggtcgggtacaccgggatcttataggtctcggggtagcgcttgaacatggccacctggccgtcggaaagtttgtccttgtacttgtcgacggtggccgcggtgatcacgaacagcggtttttcactggcgaacgggtcagccaggaagcccttgctgtccacggctccggcgtttttcgggatgcctccagtccaggcagggatcgagccatcggcgttgccggctttctcggcgcccaccggggtcaacgtagtgccgagcttggccgcctcttccggggagaccgcggccatcacgttgacggccaacaggctgagggccattaccgcaattatcttacgcatagagtgttgtccttccttaagccagatcagaagttcgcgccgaagctgagggcgatgaagtcgcggtcggtgagggtgttgtagtcgccgccgaaaaagtcggtgtagctgaggctggcggtataagtgctgcggtaatccgcatccacgccgacgctgatggccttggcgcccttgttgaacaggccgttggggccgtagccggccacgtcatgggaccaggacaggttgggcttgaggttcaccccggcaatcgcgttgttgtagtcgaggatcgcccgcgcgcggtacccccaggagttggccgtgacaaaaccgtcggtgtcaccctggaaaccgtaggcgccatacaccgagtcgcggccataacgcagcttggatttgtcctccaacccgccaacgtgcacgtaggccgcttcgccgaccagggtcaggcgttcagcgcccagtacctggtcgaagaattgggtcatggtgctttggatctgggtgatttccttgcggcggtaacctttgttgtcgtcaccgaagttgctgcggatcggcgaggccagttgcccggcgaccgggttgatcagggccagggtcaggtcggtggtgttgagttgcaccggggcattggggcgatagctgatctcgccggtccacgccgtgccggtgggcaatgtggtggagaaactcgcaccaaacaggcggatatcttccgggtagtccaggtagtactggccacggccaagcatcaggctctggaccagacctgcgccggagccgggcgcgatgccattggctgcaccggcgatcgcaccgagccgggccaggctcgtattgttggtgatggtgcccacggtcggggtgcggctgtggtagttcatgaaatacaagccgtattcggtgtcatcccccaaccaacgcaacgccgtaccgaattgaccactgtcacgcgcgtcgcgatcctgcgcacgctgcacgatcaccccttcacgagtcacttgaaagccttgcccaaacgcggcggcgacaggctgcaacggcgcaatcgccgggttgcccaccgtgtagttgccattacagccatgggccgccacatccccaccaaagaatgtgccgcagttatccagcacggtgttttcccagttcagctggtagaagccttccacggtgagttggttggtcaggctctgggaggcgaacagcatgttcaccgggatcagcccttccttgatctctgcgcccgggcggcggaaggccgaaacgtcgatggggttgatgctgttgatcgagttaccgataaaggtgctctcgccccagctgaccacttgcttaccgaggcgcacgttgcccggttggtcgccaatcgaatagttgtgatacacgaaggcatcgagcaattcatagccggatgaacgcgcgccctcgtcacgatggtgattgctgatctgcttgaactcgcggtcttcgtcctgcaactcgaagtcgtaccagtacttgccacgcacgaagacgccgctgtcaccgtacttgagttcaaggtcgtggatgcccttgaagatcttggagaaggtctcgcccttcttgaagttcaggcgcccgtcatccccggtagacgcctggccagtaccgccgttgacggtgcctaccagttttttgtctgcgtcgcgcatgccccaactcgcgcccaccgacagcgaggaatcgaattgcccttcgatctcgccaatgttgaacgaaacagcctgtgcctgggcacagcaccccaacgcaaccgcagcggccagcgcctgtggcctgaagatggcgcgcattgttgttcttgtcatgcgtcttccccggtgagtgacagaaggccccaccctactgccgcgtctcaggagcgataagcgcaccaaggagggattcgtgttgtcgctcgaaaggatgacaaggcgctctggccggggtctggccgggggcatgcagcgggtggatagggggttatcaggggaatggatagcacgtacggacactattgccgttttagtaacagtccttgtcacgaaccggcattactcatcctgttacaaacgactattcttagcgggctttcagggcaaacggcccgcttcccccgaccggaagaaaagccagattcaaatagattgaggcctgttttcaatctgttaccggtgttcactgacgttgatttgtcgctccttgatccaacgtctgacttcagccgctgcgtttgcagcggcttttttttgccctgaataaaacggggcgccatcagcgccccgcaggattaaagctttttcaagcaacgatcacaggctgtacttctgcaagttggccatcatttccttcaacgcttcgatgttgtccttggggtgtgccgcgccttcgaagtcgcagatctgctgccagtgcgccgccacgtcttcgggcgagaaccccgcctcagggtcaaagcccacacccaggctgcgttcccagcgggtcttgccgatccaaccgccgcccacttcaaacagcccggaggtttcctggcaggcttcactgcccaggtacaccaccagcgggctgaccagttccggtttgaggcgttcgaacacctgcggcgggatcaagccttcggtcatgcgtgtaccgccggtgggggcgatggcgttgaccaggatgttgttcttgcgtccttccagcgccagcgttcgggtcaggccgtacaggccgagcttggccatgccgtagttggactggccgaagttgccgtagatacccgaggtagacgcggtgaagatcacccggccatacccttgctcgcgcagatggggccaggcggcgcgggtgactttgtaggcgccttcgacatgaacccggtaaaccaggtcccagtcgctgtcgtccattttgtggaaggtcttgtcgcgcaggatcccggcgttgttgaccaccacatcgatacggccgaaggcgtcgagggcgttctgcacgatcttgtcaccgtcggtgacagagtcgtggttggcctcggcgataccgcccgcttcgcgaatctcggccaccacccggtcggcggcggacgcattggcgccttcaccttgcgtggaaccgccgagatcgttgaccagaaccttggcgccatgcctggcgaacagcagcgcatgggcccggcccaatccgccaccggcaccggtgacgatcacgaccttatcctggaactgcactgattcactcataccgaactccaatggcgacaatgggaatgggtcgagtgtcaggcaccggggcgctggtcacaataaagccggccagggctgaatggtgctcgataaggctgagggataatcgtccgatcaggaataggccattcgcggagccgagtggccgatgcgatcacgaaacgccaggtaatgcttgagcacctgcaccggcgcctcgatctgcgggtagtgaccgatattggccaatagcaccgtgtcggcgtgaggcaccagttcgtgataacgcgccaccatgtgagcaccggagatcgggtcgatctcgccgtcgatcacccgcagcggcacatcagtgtgttgcatcgccgccacccaacgctcacgcaggcgtcgacgctgggggatgtaagcgatgagtttgtgcaggatgcgcgtgccatcgttgcggtcgatcaggctccagaagtcgtccagggcgctttcgctggggcgggtgttgggtccgaatatctggctgaaactgttggccagggcattgcgcccgaacgcacgaccgatcatccagcccagggggctgagcagcagcttttgcaccagcgccggacgatgggtttccgggaacaacccgccgttgagaaacacgcagctggccatgtgaaagcggccttcgcagtgccgggccagcagttcctgggccacgctgtcgccatagtcgtgggcgagcacatgcaccggctgatccacacgcaggtgctccagcagcgcctgttgcaagtccgcctgttccaacaggcaataaccatggtcgaggggtttggccgagtcgccaaaaccgagcatgtcgcaggcgatcaccaggttgcgttgggcaaggggctgccacaggtaatgccagtcccaactggcagtgggaaagccatggatcaacaataagggttcgccctgccccgccacccagtagcggatagtgcgtccgttaaagtcgaaggtctggctgcgtttgcgccagacactcagcgggatctcggcgagaggcatcaggttttatacccaggatcgaggctgtccaatttacgcagcaacgccggccacgcaagcgcgccccccataccttgcgcactctttgtgacagccgccaccatcgccttggcaccggcgaggatctgcggcccgatggggatcaaatccgccccgccgctctgggccagcacctggatatcgcaggcgcgctggaaggtaaacatcatcagaaacgtgtcggcgatggtgctaccgcaggtcagcagaccgtggttgtgcagcatcaggaaattattttggccaagatcggcctgcaaacgggccttctcttcgtggttcagcgccacgccttcgtaggcgtgataagccaggctcgacagcacgaagatcgattgctggctgatcggcaagacgccctgcttctgcgccgccaccgcgacaccggcagcggtgtgggtatgcagcacgcacgtcacatcgtggcgcacttcatggatggcgctgtggatggtgtagcccgccgggttgatctcgtaggggctgtccatcagcttgttgccggcctggtcgaccttgaccaggctcgacgcggtgatctcgtgaaacatcagcccgtaggggttgatcaggaaatcgtcggtgcccggcaccttggccgagatatgggtgaagatcaggtcatcccagccgtgcatcgccaccaggcggtagcaggcggccaggtcgacgcgggtctgccattcggcggcgccgacctgatctttgacattctgtggcgatggaacgggggctagactcacggcaacgacctccttggcgcactttcttattgttttttgagtgatgggccagtctagtcagacgccctgcccgccgtagttgccttggcagccagcttgatgaccgtgcgggtcagccttgagaatagtttaaatccgtgcaagcgacgtcagagaagtgccgccaataaaggcgcggcgaacaggttgagcaagccggtcaggaccatcaccaggccagcaaccgagccctcttcgccgcccacttcatgggcccggctcacgcccgcaccgtgggcacccacgccaaacagcgcaccgcgcgccagcggcgtacgcaggggtagccatttgagcagcacaccgccgagcatcgccccaaacacaccggtgaacatcacgaacaccgccgtcagttcaggcacgccacccaggtcggaggacaccggcatggcgaacggcgtggtgatggagcgcggcaccagggacagggtcacagagctgtccagggccaacgctttggccaagccaaatgaggtggcgatggacgccacgctgcccgccaccatccccagcaacaacgccgaccagtaacgcgccagcaaccgccgctgctgccagatcggcacggcgaatgccacggtgacggggccgagtaccagcatcagccagtgagtatcggcggagtattcggcgtaggccgtgttcatcggcacggccaccgccagcaacagcacgggcaccaggatcagcggcgacaacagataacgcccggtacggcggtagatccagcggctgaagacatatgcgcccacggtcaaggcgagccagaacaccggcatcagctcaagcttcatggcgcagcctccagcggcacaccagctccacggtgaacgcggtcaccagcatcaccgccagggtgctgaggccgatgaccagcaggatgcgccaaccgtcattgcgcagcaggccgccgtagtccagcagactcatcagcgcagggatgaagaacagcagcatttcagccatcagcacgccggcccccagttgcagggccgccggtttgaccaggccgctggcgaagaccatcaacaacaggcccaggcctaccacaccgccgggaatctgccacgcccaccacacggccagttggcagccgaacaggtaaatggccagtagcacgaccagttcaatcaacagacgggtgaaacgtttcatgggctttgggtcctcgcaggccttcattttaaagaggcatgtcccatccccacagcgaattgttagactgccagctattccaaatcggaatttcgcacatggaattcaaacagctacgcagcttcgtcgaggtaatccaccgcggtggctttacccaggccggcaaaaccctgcatatcagccagtccgccgtcagcaaacaggttgcgcaattggagcagagcctgggcacgcccctgctcgaccggatcggctcgcagattcgcctgaccgccgccggccaagtcgtcctgcaacgcgccgaagccatgctgcgcctgcaaaacgagctactcagcgagttggacgatatgcaccagttgacccgaggcgagttgcgccttggcctgccattgttggccggtgatacgttgttcgccgaactgtttgccgaataccgcaggcgttacccgaacgtgaccatccagttgctggagggcggcagtcgcaatatcgaacaggccatcctgagcggcgaactggaagtagggggcagcctgaaacccagcgacccggcgtttgcctggcaagcgttctgcgatgagcccctggacgcgctgttgccgattgatcatccgttggcggaaaacgcccaggtacgcctggaggaattggccgacacgccgttcctgatgtaccagcgcagtttcgtgctgaacgaccgcctgatgcaggcgtgtgagcagttgggttttacgccgaaggaaatcggtcgcagtggccaggcggacttcctcgccgcgctggtcgccgccggccagggcgtggtgctgctgcccagcgtggtcgcccgtgggctggtgcgaccgggggtggtgcgcctgacgctcaaggcgcccgactacttgcgctgggacattgcatttatctggcgtgacggcgcctatctgtcgaaagccgcccaggcctggctggcattgctgcgtgagtttccggtcaagcgcgcagtgcagtgaccagctccgccagccacggttcggcgtcggcttccggggtcacactttcgctggcgtccaggcgcaacatcggcagtacttcgcgcacgcccagctcgccaaacagctcgcgcatctgctcgccaccaccgcagaaggtgtcgccgtagctggcgtcacccaggccgatcaccgcaccgggcaggccgcgccaagcggcgggcagttgatcacgaatcgttgagtacaggggttggagattgtcgggcaattcgcccatgccggtggtggacgtcaccgccagaaacgcgtccggcgcaaacgcctgcacatcggcgaggctggcgcgagggttgtgccaggcctcgaaaccggcggcattgagaatgccgacagcgtgacgggcgacttcttcagccgtgccgtagaccgagccggaaaggatggcgactttcatcaatctgatcctgtagttgagcgaaagcctgggatattaacagctgccacaattttttcggcgcaccccgtgcaacattcagggcttgccataaactccacagttcaaaaacaagccatggaccgctcaatgattaacgccaagctgatgcaactggtcatcaacgcctccaacgacggtatcgtcgtcgccgagcgcgaaggcaaagacaagccgctgatctacgtcaacccagctttcgaacgcctgaccggctacaccctggatgaaattctctaccaggattgccgcttcctgcagtcgggcgaccgtgatcagccagcactgatggcgattcgagaggcactggaaagcggaggtgcatgccgggaaatcttgcgcaattaccgcaaggacggcagccatttctggaatgagctgtcgctgtcgacggtgtacaacgaggccgacaagcagacttatttcgtcggcgtacaaaaagacgtcacgttgcaggtcaaggcccagcagcgcgtcacccaattggaaagcgaactggcccaggtcaaggccgaactggccgcgctcaaagcgacgagcggatctaacaaaatttaggaagtgcgatcattaggggggataatggcattttaacacccctaatgagcacgagtgatgcaacgcgatgcgctcctgacccaggacgagctggatttcattcagaacatgcagcacaacccgcaactcaacctgcgggatgcttcatcgagcctgaccgttaacggcggcgcacagattcgcgacttgcttacccggctggccgctcacgaccacctcaccatccaggcacaattcgataatcagcaactgaccttccccttgcacctggtggaagacgagttcaatgccgtgcacctgcgtttgggcgtgccaagcattttcgaagacgggccgatgattcgtccctggcgcctggccctggaaaccccggtggcgctggagaacatcaggggcaacctcagtacgttgtgggtgcatgaagtgtcgttcaagggggtgctggtggagattcgcgggcgggtcaaaccaccgaaaaccttttccctatggttcagcccatccggctacgagcgcatcgccttgcgcggcacattggagcgggaaaccgcccgaggcttgttcgcctatcgcctgagccagagtgatgcggatgaaaccgagcgtctgcgccagttcatcctgcatcagcaccgcctggtgcacccgcacgtgcacgcctgatttcaggtatccaggttgccgctgaggaactgctgcaggcggcgctgcatcaagcgcccgtcactgcccaggcaaccgacgggcgagcccacaaggtctttttccgccaggtccgaagcggcgccggcgatcagcaatgggcaatccagggtctgcgccaagcgattcaagcgtcccacccgctcatgattgtgtgcatgattggaaaacacgatcagtgcctggggatgggtcttctcacagatcagcgtcaattcgtccagcggctggccgaccgccaggaccttcaccgccaagttctctcggctcatcagtagcgcagccaccaacaattccagtttgcggcactcgccggggatggccgcaagcagcacccgcggcaacggctccgcacaggccagttgcaggcgctgcaaggcccggactcgcaggaagttatcgaaaaacaaccattcgctggcctgaccgaaccggccctggtgacgcaacagctcgtgccaaagcggcatcaggatgtcttcaaaagccacgctgagggggtaggtggcaagaacactggcgtactggtgttccaaccgtcggtcgtcgaacgcgctgacagcctgcatcatctgtgcctgccattgagcccagtccccgccctccagcgagtcttgctcggcgcgaacagccagggcttgctggtcgtcacgggcgagaattttcccaaccttgctgaccgccacaccgcgctcgatccaatcgaggatacgattgacggtcgtaatatcagccttggaatacaaccgatgcccgctttcggtgcgtacgggctggatcaggccgtaacgtcgctcccaggcacgcaaggtgaccggattgacgcctgtcattctcgagacttcacgaattggaaacagcttatcggaatcggtcgattcaagatgcaaattgctatcatgggaggcagtgatcacgggcattggagaccaaaaaaccaacggtaaatagaacctcatttaacgcccttagacctgtctttttcaaggtcccagcttattcggaccaatgcctctggcgtatttgtgcaaaacaggaataatccttgcctgtttttacagagcggcaccaccccgccgctttgtttgtgcgccccctacccggcccggcgcacctgaatatttggagatacacaatgtctacctcccccgtcaccctgatggttgcgcgtcgcgtggccaagggtcgctacgaagaattgatggcctggctgcgtgaaggcgagcaattggccacggattttccgggttacctgggctcaggcgtgcttgccccgccgcccaacgatgatgaattccagattattttccgcttcgccgatgaaaaaaccctgcatgcctgggagttttccgcgtcccgcagtgcgtggctgagccgtggcagtgagctgtttgccgacccgtccgaacaccgcgtgcgcggcatcgacggctggttcggcgcagtgggcgcgcgcccacctcgctggaagcaggccgtagccatctggctggcgtttttcccggtgtcactgttgttcaattttgtgctggggccgctgctgagcgaactggacctggcaccgcgcgtgctggtcagtaccctggcgctgacgccactgatggtttactggttcatcccgctgtcgacccacctgttggcaaactggctgcatcctgcccctgcaccgcgcaaggctagcgaagccgcggcgtgaatacaggggcgctcggtcgctggtatagtttcaacctgccagcgactcgagcctcccatgactgcaacaaacgccccgatcctgatcaccggcgccggccagcgtgtcggcctgcattgcgcccagcgcttgctggatgacggccacccggtgattttcagctaccgcagcgaacgacctggcgtgcaggtgttgcgcgagcgtggggcgatcgcagtgtttgccgacttctccagccaggccggtatcctcgcatttatcgctgagctgaacacccatacccagagcctgcgtgcgatcatccacaacgcctcggcctggatggcggagtcgcccgacgacgaaagccgcgcgtttaccgacatgttcagcgtgcacatgcttgcgccgtacctgatcaacctgcattgttcacccttgctgcaccgctcgacaccggccgacatcgtgcacatcagcgatgacgtggtgcgcaagggcagccgccagcacatcgcctattgcgccaccaaggccgggctcgacagccttacgctgtcgtttgccgcgcagttcgcgccgttgatcaaggtcaacggcatcgccccggcaatggtgatgttcaacgacggcgacgacgcgccctaccgcgccaaggtactggccaagtcggcactgggcatcgagcccgggcccgaggtgatctaccagagcgtgcgttacctgctggacaacccctatgtcaccggtaccaccctgaccgtcaacggcgggcggcatatcaagtaagccgtttgtgaggatgttgtatgaccttatccctgccccaccattaccgcgagatcctcaagggcttgggcgaagaccccgagcgcgaaggcctgctcgataccccaaagcgtgccgccaaggccatgcagtacctgtgtcatggctacgagcagaacctggacgaaatcgtcaacggcgcgctgtttgcctctgacaatgacgagatggtgatcctcaaggacatcgagttgtactcgctgtgcgagcatcacctgctgccctttatcggcaaggcccatgtggcctatatcccaaccggcaaggtgctcggcctgtcaaagctggcacgcatcgtcgacatgttcgcccgccgcctgcagatccaggaaaacctcacgcggcaaatcgccgatgccatccagcaagtgacccaggccgccggtgtggccgtggtgatcgaagccaagcacatgtgcatgatgatgcgcggtgtggaaaaacagaattcaaccatgaacacctcggtgatgctcggcgcgtttcgcgagtcgaacaccacgcgcatggagttcctgcaactgatcggacggagcaagtagcaatgccacaacttcaaccaggcatggcgcgcatccgggtcaaggacctgtgcctgcgcacctttatcggtatcaatgaggaggaaatcctcaacaagcaggatgtgctgatcaacctgaccatcctgtacgccgcccaggaagctgtgcgcgacaacgatatcgaccacgcgctgaactaccgcaccatcaccaaggcgatcatcgcgcatgtggagggcaaccggtttgccctgctggagcgcctgacccaggaactgctggacctggtgatgagcaatgagtcggtgctgtacgccgaagtggaagtggacaagccccatgcgttgcgctttgcggagtcggtttcgattaccctggcggccagccgttaacccctgagatttgcgtgaaccttatgaacgaccaacaacgactcgaactcgaagccgccgcctttcgccggctggtggcgcatctggacagccgcaaggatgtgcagaacatcgacctgatgaacctcgccggtttctgccgcaactgcttgtccaagtggtacaaggccgaggccgacgcgcgccagatcgagctgagcctcgatgacgcccgtgaagtggtgtacggcatgccgtacgccgaatggaaaacccaataccagaaagaagccagcgccgatcaacaggcggcgttcgccaaaggaaaaccccatgactgatttgaacaccctgcgcgccagcctcaacagcggcgaacatgtttttgccgataccctggcgtttgtcgctgccggttatgagtaccagccacaggcgttcaccaatggcgaggtagagaatgccgcagggcagaacgaagggtcgtgcaagacgttgggtttggcgctgctggaaggcttgagcgatcaggaagcgctgctggcgtttggtgaacattaccgctcagtggtggcgacgcctgagggcagcgaccacggcaatatccgcgcattgatcgcaaacggcctggccggtgtgaagttcaccgcccagcccctgactcgcaaatcctgagccagacctgaatcaaaatgtgggagggggcttgcccccgattgcagcgtgtcagctaatgaatacctggctgatacaccgctatcgggggcaagccccctcccacatttgtttgcggcgttggttagaacgcagcgtctttcagaccatccaggtaacgctcggcatccaatgccgccatgcaaccggcgccggccgaggtgatggcctggcggtagacgtggtcggccacgtcaccggcagcaaagataccttcgatgttggtcgcggtggcgttgccttcacggccgccctgcaccaccaggtaaccgtctttggcttccagcacgccctcgaacagcgaggtgttcggggtgtggccgatggcgatgaacacgccgtcgactttcagctcgtcgaagctgccgtcgttgttcttcaggcgggcacccgtcacgcccatgttgtcgcccaggacttcgtccagggtggcattgagcttgaggatgatcttgccttcggcgacacgggcatgcagcttgtcgatcaggatcttctcggcgcggaaggtctcgcggcggtgaaccagggtcacggtgctggcgatgttggccaggtacagcgcctcttccacggcggtgttgccaccgccgaccacggcgaccggtttgttgcggtagaagaaaccgtcgcaggtcgcgcaggcggaaacgcctttgcccatgaacgcttcttccgacggcaggcccaggtagcgagcgctggcgccagtggcgatgatcagtgcgtcacaggtgtacacgccgctgtcgccggtcaggctgtaaggcttcttggagaagtcgacctggttgatgtgatcaaacacgatctcggtttcaaagcgttcggcgtgttctttcatgcgctccatcagcaccgggccggtcaggccgtggacgtcgcccggccagttgtcgacttcggtggtggtggtcaattgaccgcccgcctgcatgccggtgatcagcagcggcttgaggttggcccgggcagcgtagacagcggcgctgtaaccggcagggccggaaccgagaataatcactcgcgaatgacgggtatcagacatgactcactcctatcgaccgcccggactacaaggcggctggaataaaaaagggaccacgaagcacttggggaaggcttgaactcgcaggccctgaaaaataatgggtgcagcgtatcgaggggggcaagattaaggaaatacggaataacaatccagctcatagacggtcactatgtagttggcccgactgatcgacgggtttgttacggctgatgtcgcggctttcgcctgcgatgtaaagccggtaaggtcggcgcgttcgcccttttgctcggagttctccatgcctgcccctgctctttccggcccgcaatacctgcgcgaaggcctcaaactcgtattgagccccggcctgcgtctgtttgtgctgctgccgctggcgatcaacctggtgctgttcgttggcttgatctatttcgccggtcatcagttcagcctgtgggtcgatcacctgatgccgacgctgccgagttggctgagcttcctgaactatctgctctggccattgttcgtggtgctcgtggtgttgatggtgtttttcaccttcaccatgctcgccaacatcatcgccgcccccttcaacggctttctctctgagaaggtggaagtggtggtgcgcggcaccgatgacttcccggccttcagttggggcgagctgatcgcgatggtaccgcgcaccctcgcccgggagatgcgcaagctgggctacttcctgccacgggccatcggcctgtttatcctgtcgtttattccggtggtcaatttggtcgctgcaccgctgtggttgctgtttggcgtgtggatgatggcgatccaatacatcgactacccggccgataaccacaagctgggctggaacgagatgctcgcctggctgcgccagaagcgctggcagagcatgagtttcggcggcatcgtctacctggtgttgctggtgccggtggtcaacctgctgatgatgccagcggcggtggctggagcgacgttgttctgggtgcgcgagcaaggcgccgaggcgatggcagcgcagcaaaaggtgactcagtcataaatccatcatctcgatgacacaatgacgacatggcccacggtgacactgtgggtcatgacgacagcttcgcttcacatcacccttatcaccgaaaccttcccgccagagatcaacggggtggccaatacccttggccgcctgtgcgaggggttgcgggcgcgtggccatcaagtcgagctggtacgcccgcgccagggcgtcgaccagagccgccccagcgacgacgcgttactgctatgccgtggctggccgctgccgggatatccgggcctgcagtggggccagtcgtcgatgcacaagctgctgcggcgctggacgcgtcagcgtccggacgtgctgtacatcgctactgaaggccccttgggcttgtctgccctgcgtgcggcccggcgcctggggatcagcgtggtcagtggctttcacaccaacttccagcagtactcgaaccaatacggcttgagcatgctgagccggatggtcacgcactacctacgctggtttcataaccgctcaaccctgaccctggtgcccagcgccagccagcgcctggagctcgagcgccggcatttcgaacgcttgggaatgttgtcacgtggggtggacagccaactgttccatcccgcaaaacgtgacaatgcgctgcgggaaagctgggcattgaacagcgaacagactgccgtgctctacgtgggcaggctggcgcaggagaaaaacctgggcctgctaaagcgctgcttcgaaacgttgcaagacacctacccaatgcgccagatgaaactgatcatcgtcggcgatggcccacaacgcgcggcgctggaaaaggagctgccggaagcaatcttctgcggcaccttgcgcggtgaagaactggcgcggcattacgcatcgggcgatgtgttcctgttccccagcctcaccgaaaccttcggcaacgtggtgttggaagcgatggcatccgggttgggggtggtggcctacgaccaggccgctgcaacccagcatatccgccacggctacaacggcgtgctggcgatgcccggggatgagaacgcattttgcgaggcagccaactggttgctggaagacgccgaaagcttgcgccgcatgcgcctgaatgcccgccaacacgccagccgccagggctggccggcgattatcgagcagttcgagcgtcagctgcgtggggtttgcaaggacgggcatccggtgcccgccctgtcgccgcttacaccagggtcgtcaacgcctcacgactgaaaggcaggatgtcgccctcgcgaccctcgcgcaccttcaacgcccaatccgggtccaccagcagggcacggcccacggcgaccagatcaaactcgtcgttgttcaagcgctccagcagcttctccaggctggccggttgcgcgactttgtcggtgttgaccatgaactgcaggaactcgccatccaggcccacgctgcccacggtgatggtcggcttgccggtgagctgacgggtccagccggccaggttgaggtcggaaccttcgaattccggctcccagaaacgccgagtggagcagtggaaaatgtccacacccgcatcagacaacggcttgagaaactcgcccagcgcttgcgaggtttgcaccaggcgcgcggtgtaatcctgctgtttccactgggaaaagcggaagatgatcgggaaatcagggccgaccgcagcgcgggtagcctggatcagttcaatggcaaagcgtgagcggttggccaggctgccgccgtattcgtcggtacgctggttgctgccttcccagaagaactgatcgaccagatagccgtgggcgccgtggatctccacgccgtccatgccgatgcgctgcgcatccttggcggcttgggcgaaggcgttgatcacatccttgatgtcttgctgggtcatgccatgcacgacgacgttgccatccttgagtttttccatcgggccgtaggccggcacgctggcgtcaggttcagtgccgatacggcgcacactacctacgtgccacagctgagggacgatcttgccgccttcggcgtgtaccgcgtcgaccactttcttccagccggccagggcggcttcaccgtagaagtgcgggacattggggtaaccgttggaggcctggtggccgaccactgtgccttcagtgatgatcaagcccacaccggcggcggcgcggcgacggtagtactcgatcactttggagttgggcacgccacccggcgagaacgagcgggtcatcggcgccatgacgacgcgggtcgacagttgcaatgcaccgagctggaagggtttgaacaaggcttggacgggcatgggggcactccacggaagacggggtttatgatgtggataatatggggagtgcagcatgctgggtagcactattgatctgggtgattaaggggtaaaagtgatggccggttggggctgctacgcagcccagcgcgggacgagcccgctcactacaactgcggcgctcagctgagggctttttcgatggcctggacgatcgtcgggtcatccggtgcggtgcgtggggagaagcgcgcgagcactcgcccatccttgcccagcaggaatttttcgaagttccaggtgatatccccaggaaactctgcgccctcgcctgccagcaggcggtacaactggtgacggtcaggaccgttgacctccagcttactgcccagagggaatgtcaccccgtaattcaggctgcagaactcctggatctcttcttctgtccctggctcctggccagcaaactgattgcacggcaggccaagcacggtaaacccctggtccttgtactgctggtagaggttctccagcgcggcgtattgcggggtcaagccacatttggaggccacgttgaccaccagtaccacttgccccttgaagggcgccagcggcagctcttgtccgtccaaagctttgagtttcaggtcgtggaaagcactcatgacgaactccagatatcccatgttcttcgcattgcggcgcttcgagattacaactcacaagcctgcaatcatagacgccgattgcaaaacgcgcctgcgagttactgagcggtaggccagggcagaatcggaatcgccgtcacggcattctgcgggctgccttcgatcaggcggtcgctgtacaccaggtacaccagggtgttgcgcttcttgtccaggaagcgcaccacctgcatggtattgaacaccagggaggtgcgctccttgaacacttcgtcgccgtccttgagttcgcccttgaagcggatcgggcctacctgtcggcaggcgatcgaggcttcggcgcgatcttcggccaggcccaggccgcctttcacgccgccggtcttggcgcgcgacaggtagcaggtcacgccatcaaccttggggtcgtcaaaggcttcaaccacgattcggtcgttggggccgacaaacttgaacacagtggacacctggccgatttcctcggccgaggccagcaacggcatggccagcagcaggccgaacaatcccttcatgacacgcatggtgtattcctttggttagaccaggatcaggttatcgcggtgaaccagctctggctcagccatgtatcccaagagtccgacaatcgcatcggaggattgtccaataattttctgggcttccagcgcgctgtagttggccaggccacgggcgattcacgaccgtcgggctaggaaaagaggcgacgcggctagattgaactagccctccatagcatatttttctataagaacaagaaaatataaatcgtctagaaatataaacatttggttaatgcaatactttacagaaatcaaaaacacacactaaaacaatgagttacacaaaaaaacaaaatgataaaacataaggactacaagcgaaaaagataaaagccacacaacaataagaattaggctataaaaaaacgtcacagaactcacatcctcgaaacagcaaaaccgcccaaaacatccaaagatatatttagttacatgacgcaacttgcccagacaactagcacaaacaagtatgtaaaacgcaaattcagcaaaaccccacaccacacacagaatgaaaaagcaaataccttatggcataacagcaatacttctgggcttctccaccatctctgacgcagcaccaagcatgaagtcaagtcatccggaacaagcaatagaaagtacgtcattaaacagggccaactcagtacccctaacgtcaacgctggaggatcacttcatagacgaatacaaaaggctaaacgcatcttgcaactaacaaagctaacgcgcgcggagagctaatgaattcaacgcagacgctctccgcttgctatcaaaacgaaggaacgtatatggacaattgcacccaaattaaaaatcttatttttcacgacgcggagggcaacagaattggattaattgccccttcaactttctactgcatatatggtggttgcacatatataaatggcccaaagaaagtaattaagttacacgaacaaaccattgaagctttaaccgaaggattacgacaatcaggatcgttgatagagggtgatcataaagacattgaaaaattattatcattgctcgcaaaccctattagcagccggaccgctagctttttcatgtgtgcaaatcaaaatggcaaaaaaataattgacgactttaagtccatagaaaattcaaacctcttaatcgtaggatgcggaggcataggcagcacggcggctttgctgttagctggctgcggagtcaaaaacataacattagtggactccgatattatagaaaaaagcaatttaaaccggcagttattctggaaacttgaagatataaaaaaacccaaagtagaagtattaaaaaaagccattgaggaacgatttgaagacacaagcatcacgaccctacagactcacttagacctcaacggactaagacaacttgttggaaaaaagaaatttagcgtcgttttagttactgctgatgacccaccaacaatgtcggctcagtgcgcagacctagtaaaacactctgaaacaccattcgtgagtggtggatatctacacggacaatgtgctgttaattttttccctgtatctcttcacgaagaactccgtgaaatccacccaaatgcaagtaaatggaaaaagcttaatccgtcaataatgcccagcttcgggcccaccaatatgaacattgcatcgttattagcgtccggggcaatttcttttatagcaaaccactcactcccactaaaacatcatacatcaattcaatggaatgcaagcattgcacccagctcattcagaacattcactgatgaaaaacaacactaaccaagagaaaacatcatgaatattataaaatcaatacatatggcgctaggtttactgatagctaccagtgtaaatttatcaaatgcaaacgacctcgtaactgatacttcaacctcacatgtactaacaattgtattcacccctcctaaaggtatggagcgcgagttttttgaaaactttgtgcaaaaccaatcgaaatacatgcgtatttactcgggaaagcaaaaacaaaatactcaagtgataaatattgcaccaacaaccctaggagaaccgcttatacatctaataatctataataacaaagcttcatttgataatgcgaaagacatatttcgcagcaccgaagtttttgcgaactacatgcaaaagcactcttcccgattcggaaactacgaaatatcaaaaccgtacctagagaactcaaacgtttattttggagaggtgataaaaaactaaaatatgcgaacagtaggtccaacatgaaacttaccaaaaccgctttctatagcctaatgctatgtagcttagccaactcatcagttgccgacagcattgtaaataacctaacgattataaatagctgcataaactgtcatggtataacaggaagcaactcaaacgaaataccacagttccataaaaaaaacgaggagcaattaacacaaatactgatggcctataaaagcaaaaatacaaaagggaccatgatgaatagagtcatggagcaatatagccaacaggacataaaggctatagctattatttttagccaggcgaaccgctgagtatgattcagcgtttactcttgcgcttccacaaactcggagttactccactatgactaaatcacgcagagacgctataaaattaattctggctagtcttggctacgcccttaatacttcgggcgccgcaacagaaaaagctcagattacagcctcaaaaaaaatagtcatcattgggggtgggtttgccggagccacacttgcgaacactctacacgcgctagataacacactccatataactttaatcgaaccaaataaatactatcattcatgcccactcagcgccgagtacttagtaggtaagcgcactaaagaatcgctaacatttagctacagaaacctgtctaacgtaaaatcaattcatgttattcacgatactgccacgcatattgactatgaaaagaaaacaatactaacgaaacgttctggcagtcacagctatgaccgatgcgttgtaggtattggcgtaggctacaagtttgactcaattgaaggttatagccctgaagtttccgaacaactcccacacgcatggtcaggtggagagcaacaagcgatcttaaaaaaacaacttatgtcgctacgagacggcggaacggtattgatttccgcaccttcaggcgactacaaatgcccgccaggaccatacgaaagagcaagtctaatagcggaatttctaaaaagaaacaggcgccgatcaaaaataattatattggatggaaaaagtgattttcctaagcaagagctttttgaaaaagcatggagggagttgtatggctatggaacatctaacagtattattgagtggatcagttcggaaaagggtggcattgtctcagccgtcaatccaagaaacagagatattctaacttccgctggaactattagagcggacatattgaatatcatcccccctcaaaaagccggcacatttgcacatttcaacgacctaaccggacctcatggctggtgtccaatcgatacgaagacttttgagtcatcgattaaaccttacgtccacgtaattggtgacgccgcctacgctgaaatgcttcctaaatctgcattcacagcatgcgttgaagcgcgagtctgcgcagtagctatttactgcctattcaacaatcatcctattccatgccctcaattcatgaatgtttgttatagcttatgcgcggagaactacggaatatctgtattcttacgttatgaaagaaacataaaaacaaacatacttgatataaaaaacctagtaaagacccccctgaactctacaaaagaagactatcgaaaagaatcccaatttggctatagcatgttcaatactatgacagcagaagcatttgggtaacttcactcaggaattcaatatatgctattagacctttcatccataagcaaagttagctaccccgactttattgctttaatgaagcaagataacactccacctggcggaatagaaactttaaattattggataacaaaaggaaaaatccatcggaaatctacaattctagatttagcttgctctacagggtttagctcaagatattgctttcagcagacaggagcaaaatctattggcattgacatctctcttgactctatcaacgtggccaataataaagttagggaaatgggggcagcagcatgcgtgacgtttctaaatatggacgcttgcaaattatctttcaaagatgaaaagtttactcacgtattagcagggtgtaacttcgcattcatccaagaccgttcaatagctcttgacgagtctcttagaacactgtctaaaaatggggcaatttgcgtttcaaacttttattataggaccccaccgccaaatgaaatactggaggaagtccgtcattccattggatttaaaccaagtcataactggacctacgaatattggctaaactttttccagtctaaaggcttaaagctttcttatgaacataattataatctagcctccatccctgaaaccgtactccacagatccatagaacaatatatacacaaggaaaacacttttacatccactttaattccagagttcaagaatgaattttttcaaaaattttatagcataaaaaaggcccttaactctcagcgaaattaccaaggagtgtcagtacagatatggcacaagccctagcccctacacgcgtgagaaacgctatatctcggatagctcaagatcactctttagatgatgcctttgtagtcattgatatggttgaggttctggaaagagctatttctttcaagtcatgtgcagaaaagcactttaaaaatattgaaattgcatactcatataaaactaacaacctatcctctctttgtaatgcattaagccaaaaaggcttttccgccgaggttgtgtcgttggatgagatgcattgcgcgatagctgacggatatcttttggataagatactttttgatggaccttacaaaaaatattcggagttggagtttgcaatatcgcacaatgtaaggatacaagttgacaacatatttgaactagaaaacatatattacatatgcaaaaagtcaaataaaacagcacaaatctcgctgaggctttcgcaccactaccgccttgcccagtctagatttggattaaacaagcaggagttacacatagccctaagtaacaaaaaatacactgacaataatcatataaacctcaaaggctttcatcttcactctggctctaaccttaaagatacagctagtattgaaaatactcttaccgaatatgcagacattattcttcgatatatgcctgaagatggatggcttgacctaggcagtgggtttcctgcagattcattttcttcagacccacaccaacctacacctactgtagattcatttatgagaaatcttaaaactgagcttagtaggctattcaaaagcgcgtatgaaaattggaaaattatatttgaacctggacggtgcctggtagaggactgtggatatttcgcaacgaaaatagtcagttcaaaaaaaagacttgatacaaccatcctgcaaagcaacatcggtataaattgggttccatcagtacacaactgggctcactccattgaaccaatcacacccaatacgactttaccaccaaacaagcaagtcattagcggcatcaattgtttcgaatcagactacatttgtttcgacttcaacaaagcgaaaatcgatataggtgactaccttcttgttcgcggctgcggcgcttatgacttacaaacatcaaatatttggacccgatgcggtgtcagagtttactcgatattctcccacggctgcgtactgtccagaacccaccaaaaaagcgaaagtctgcgaactcgcgacgtaccgactttaaacacaaaaattgtgatttctcagtctttacatttgcttgaggcaaatcaaatatattacaaagagctacataatttaatcatagaaaacaaattttatctaagcgagtttcttgactggcctaagttcataaataccgagacggacaccctagagtttttagccaacgcagcaatacagcataaaaggtcatcctcaaaaacgtttatcatttcctataacaaccaatgcacaggtgtaatctctttcaacaccatagataggcataatcaaacagcagagattggatactggatctcacagaacaatgaaaaaaaaggaatagtttcctctgcactaaaacacctaatagaaatgtattcaaaagacaattacataatgcgattcgtaattaaatgctcaaccgccaacatcaaaagtaaccgcgtcgcgaagaggaacggatttaaacttgaggggaagttatttaaagcagaaaaagtcaacgaaatcttttatgaccagcacatttactcgaaaacgatgcatccctgacatcgttaacccaaatattctctatgagcttataaagctactgctaagaagcacgcagccttaacttatccattagtcacgttcggtaggccagggcagaatcggaatcgccgtcacggcgttctgcgggctgccctcgatcaggcggtcgctgtagaccaggtaaaccagggtgttgcgcttcttgtccaggaagcgcaccacctgcatggtcttgaacaccagggaggtgcgctccttgaacacttcgtcgccgtccttgagttcgcccttgaagcggatcgggcctacctggcggcaggcgatcgaggcttcggcgcggtcttcggccaggcccaggccgcctttcacaccgccggtcttggcgcgtgacaggtagcaggtcacgccgtcgaccttggggtcgtcaaaggcttcaacaacgattcggtcgttgggcccgacaaacttgaacacagtcgacacctggccaatttcttcagcagaggccagcagtggcatggccaacagcaggccgagcaatcccttcatcacgcgcatcgtgtgcttcctatggttagaccaggatcaggttatcgcggtgcaccagttccggttcagccatgtaacccaatactccgacaatcgcatcggaggattgtccaataattttctgggcttccagcgcgctgtagttggccaggccacgggcaatctcgcgaccgtccggcgccacgcacaccaccatctcgccccggcggaagctgccctgcaccaacttgacgcccaccggcagcaggctcttgttgccttgagacaacgccgacacggcaccctcgtccagcaccagcgtgccacgggtttgcagatgaccggccagccactgtttgcgcgccgcgagcatgccgcgttccggtgacagcagcgtaccgatgcgttcaccggccttgaggcggtccagcacacgttcgatgcgcccaccgacgatgatggtgtgggcgccggaacgcgccgccaggcgcgcagcgcgcagcttggtctgcatgccgccacggcccagggcaccaccaacgctgccggccacggcgtccagcgccgggtcatcggcacgggcttcgtaaatcagttgagcgtcgggattgttgcgcgggtcggcgtcgaacatgccatcgcggtcggtgaggatcaccagcaggtcggcttccaccaggttggccaccagggcggccagggtgtcgttgtcgccgaagcggatttcgtcagtgaccacggtgtcgttttcgttgatcaccgggatgaccttgagctccaccagcgcgcgcaaggtgctgcgggcattgaggtagcgcttgcggtcggacaggtcgtcgtgggtcagcaggatctgcgccgtgtggcgaccgtgctcggcaaagctggattcccaggcttgcaccaggcccatctggccaatggcggcggcagcttgcagttcgtgcatcgcgctgggtcgcgcggtccagccgaggcggctcatcccggcagcaaccgccccggacgacaccagcaccaactccacgccagcctcatgcaaggccaccatctgctcgacccagacgcccatggctgcgcgatccagccccttgccatccgccgtcagcaacgcactgccgatctttacgacccagcgctgcgcacctgtcactttgctccgcatcatcttcaaccttagattgagggcagcgcgacccagcgcggcccataacgttaaacccggatactaaaacgccgctctataaggagcggcgttcaagtttatcgcaacgaatcagtcgcgcacgtaaatgatttcaggaccgtcttcatcatccacgtcttcttcgtcccaatcgtcgtcgccgatgtcatggaccgacttcacgccgctgcggcgcagggcgcgctggtcatccagagcctgcagttgagcgcgggcttcgtcttcgatgcgctggtcgagttcggccagttcggccttgaacaccgggtcggccgccaggcggtcggcacggtcttcaaggtagcgcatgatatcgcgggtcaggcgctcggtgccttctttggcaatggcagagatcacgtagaccgggccttcccactccaggcggtcgacgatttccttgacgcgcgcttcgtgttcttcttcgaggatctggtcgcacttgttcagcaccagccaacgatcacgctcagccagggacgggctgaacttggtcagttcgctgacgatcacttcggcggcatccggtgcactggtgtcatccagcggcgccatgtccacgaggtgcaacagcaaacgggtacgcgacaagtgcttgaggaagcgaatccccaggcctgcaccatcggaagcaccttcgatcaggccgggaatgtcggcgatcacaaagcttttccaacgatcgacgctgaccacacccaggttcggcaccagggtggtgaacgggtagtcagcgactttcggcttggcggccgacaccgagcggatgaaggtacttttaccggcgtttggcaggcccagcaggcccacgtcggcgagtactttcatttccagcttgaggtcacgctgctcacccggcttgcctggcgtggtctggcgtggcgcacggttggtactggacttgaatcgggtgttacccagaccgtgccagccgccctgcaccaccatcagcttctggccggccttggtcaggtcgccgattacttcctgggtcgcggagtcgatgatcgtggtgccgaccggtacgcgcagtaccaggtcttcaccttttttaccggtgcagtcggtgctgccgccgttggagccacgctcggcatcgaagtgccgggtgtaacggtagtcgaccagggtgttgaggttttcgtcggccatcatgtagatggaaccgccgtcaccgccgtcaccgccgttggggccaccgttttcgatgaatttttcgcgacggaaactcatgcaaccgttaccgccgtcgcctgcttttactcggatggaaacttcatcaacgaacttcataacaaaacgcctctcgccgcttggacgagcttaagaaaccaagacataagactcttgcaaaaatgagcgcagcgacctcaatcagcgaccgcaaaaccagcgcctgagcccattacaaacagctttgcaagagactcaccccacaaacgaaaaagccccgtcgcaagacagggcttttccagcgatctcgcaattaagctgcgacaacgctcacgtaacggcggttgaacgcgccttttacttcaaacttgatcacgccttcgattttcgcgaagagggtgtgatctttacccatgcctacaccgtaaccggcgtggaattgggtgccgcgctgacgcacgatgatgttgcccggaatgattttctggccgccatacatcttaacgccaaggcgtttggcttctgagtcgcgaccgttacgggtactaccaccagcttttttgtgtgccatgagtcaattctcctagtgaggaattaggctgaaattaagcctgaataccggtgattttgatctcggtgtaccactggcggtggcccatacgcttcatgtggtgcttacgacgacggaacttgatgatgcggactttatcgtgacgaccttgggagatcacttcagccacaacggtagcgccagcaacaactggagcgccgatgttcacgtcatcgccattggcgaccaacagaacgcgatcaaaagtaacggattcgccggtagcgacttccagtttttcgatcttcaggtattcacctggggcgactttgtattgcttgccaccagtaacaattactgcgtacgacatggtatttctccgataatcctgctcacccagcgctttataagaagaggtattggctggcatggctgcatgggatggacgtcccgaatgcaattgcgtaaggcaggtgctgcccaggaagttcagggtgcgcgattgtacgcaaggcaacggggtgttgcaagaggccgtctatcgcgccttgacactacggggcctgggtcctagcatgccgcgcaacccttctggagcgactgtcgctgatgcaaccccaagctttctaccgcgcggtcgcggacgattttagcgccgtcgacggcatcatcaagaagcagctgacttctaaagtgccgctggtctccaaaattggcgactatattacgtcggcgggcggtaagcgcctgcgtcctttattagtgttgctgtgcggcaaggccctgggccgtgaaggcgatgacctgcgcctgctggcagccaccatcgaattcctgcacaccgccaccctgctgcatgacgacgtggtcgacatgtccggtatgcgccgtggccgcgagaccgccaatgccatgtggggcaacgcccccagcgtactggtaggcgatttcctttactcgcgctcgttcgaaatgatggttgaactcggctcgatgcctgtgatgaagattctttcacaggccacgcgcatcatcgccgaaggcgaagtgttgcaactgtcgaaggtccgcgacgccagcaccaccgaagaaacctacatggaagtgatccgcggcaagaccgcgatgctcttcgaagcctccacccacagcgccgcagccttgtgcaacgccaccgccgaacaggccgaagcgctgcgcacctttggcgatcacctgggcgtggcgttccaactggtggacgacctgctcgactaccgtggcgatgccgaaaccctgggcaagaacgtcggtgacgacctggccgaaggcaagccgaccttgccgctgatctacaccatgcgcgaaggtacgccggaacaggccgccctggtgcgcaaggcgatccagaaaggtggtatcgaagacctcgaagccatccgcgccgctgtcgaagcgtcgggttccctggactacaccgcgcaactggcgcgtgatttcgtggcgcgtgccatccagtgcctggaagccctgccagccagcgaataccgggacgccctggtcgagctgagtgagtttgcggtcgcccgcacgcactgacgcggacgaatgtgggaggggctcctcccacatttagatttcatacaacctgtaagaccacaaatccctatataatgtgcgacttttagccatcctgactttcaaggagctttagtgagcacgttgccaccctgcccgaaatgcaattccgaatacacctacgaagacggcgcccagctgatctgcccggaatgcgcccatgagtggtccgccactggcgaggccgaagcggccggcgatgaagccgtgaagaaagactctgtgggcaacgtcctgcaggacggcgacaccatcaccgtgatcaaggacctcaaggtcaaaggcacctccctggtagtcaaggtcggcaccaaggtcaagaacatccgcctgtgcgacggtgaccacgatatcgattgcaagatcgacggtatcggcccgatgaagctcaagtccgagttcgtgcgtaaagtctgaacccgctgcacccatcccgcgcccgccgcgggatggcgtttcgccctctgcgttgacctctcgcaatatccacacagaaaaacccggaaatcgccaataggcacttgctattctacgaataagaattattctcattgaaacccatcaaggagatgcgacccatgacttatttgatagatgcctggctggaccgcccacacccttacctgcggatcctgcatcgggaaaccggtgaagtctgtgcggtactggaagaagaagcgctgagtgaactgcaggatcagggcgacctggacgtgaatggcctgagttcgagtgaacctggagtgctgaaggaggtggtgcgtaatctgtttctgttctgctatgcccgagcgttgcgcccggcgacggagctgaatggcaagttccatccatgaacacacccgcaaaacactgtggggacgagcaggctcgctcccacaggtaatcagcaggtcttacagaacgtcgagcagctcgacgtcgaacaccagaacgctgtgcggcgggatgctgccaacgccttgagcgccgtaagccagttcgctcggcacgtacagacgccatttgctgccggcattcatcagttgcagggcttcggtccagccggcgatcacgccgccaaccgggaattctgcaggctgaccgcgctcgtaggagctgtcgaacacagtgccgtcgatcagggtgccgtggtagtgagtacgcacttggtcttcacgggttggcttggcgccatcaccggcggtcagcacttcgaactgcaggccggaggccagggtggtgatgccatcacgcttggcgttttcagccaggaatgccaggccagcgcccgccgcagcttcagcctttgcagccgcttcggcctgcatgatttcacggatcactttgaagctggcagccatttgctcctggtcaacacggcttggcttgccggcgaaagcgtcggtcaggccggccaggattgcgtccaggcttacaccaggtggcggattgtcgcgcagttggtcgcccaactgacggccgataccgtagctgacgcgggtttcgtcggtggacagattaacttcggacatgaagaggctccgctgtagggcgacacagtttcccgtgtcatccaaaactaaaagggcccgcagactagcacaaaaccggcgcgcacgatgagcttggcgcctcgtgccggcgggccgccgttagtcggttactcgcgggggcgctcatctattcacgaataaaaagtttcagattcccactcacccgccgatacagcgctacacatcttggctggctcaaacaacaacaccgcccagcagacagacatcacctttgcggagcattcgatgaacagctggttcggtaacatcagcgtcaacctcaaactcggcctgggcttcggcctggtgctggtcctcacctcgatcctcgccctcactggctggaccagcctgggcagcctgatcgaccgtagcaactggatgagcgacatcacccagctcaacgcgtcgctgaccaagctgcgcatcgtgcgcctgcaatacatgctcgccaacggcgacgaggccgtggcccagaacgtacagaccaacctggatgccttcgctgcccagcaacagaaactgctggacagcttcaagagcccggagaacgtcaagctgctcaacgagcagaaagcgatcatcaccgcttaccagcagtcgctaaataaaatgcgtgaggcctaccgtaacggcaacgcctctcgccaagtaatgggcgacaaagccgacatcgccaatgcgcagatcaatgcgctggagaacagcgtcaagcaaatgcctgacagcacggagcacctggcccagttccaggccgtggccgacgccaagatgcaattccaattggcgcgctacgaagttcgcgggtacaccggtaacgtcaacccggacaccgaagcccgtgccgccgcacagattgaaaaagccatcgccggcttgaaagacctcagcgccgctttcggtagcagccaacagaacgcactgacctcgctggaaaccgctctgggcgcctaccgcactgccgtgcagaactacaaggcggccaatgccaacatcgtcaccgcccgggccgaaatgaccacccaaggcgccgatatcgtgaccatcagcgacaagctgtacgacattcagctgaaccgccgcgacgccgaaagcgcccaggcccgcagcctgcaattgatcagcaccttgctggccctgctggtcggcgtgattgccgcgctggttatcacgcgccagatcacgcgcccgatccaggaaaccctggcagtggtggaacgtatcgcttccggcgacctgagccacaatatccagattacccgtcgcgatgagctgggcgtgctgcaacaaggcatccagcgcatgggcaccaccctgcgcgaattgatcagcggcatccgcgacggcgtgacccagatcgccagcgccgccgaagaactgtcggccgtcaccgagcagaccagtgccggcgtgaacagccagaaaatcgagaccgaccaggtcgccacggcgatgcacgaaatgaccgccaccgtgcaggaagtcgcgcgtaatgccgagcaagcctccctggccgctgctgacgccgatggccaagcccgtgccggcgacaaagtggtcgctgaggccatcgcccagatcgaacgcctggccgctgaggtggcgcgctccaccgacgccatgacccatctgcaacaagagagcaacaagatcggcagcgtgatggacgtgatcaaggccgtggccgaacagaccaacctgctggccctcaacgcggcgatcgaagcggcgcgtgccggtgaagccgggcgtgggtttgccgtggtggccgacgaagtacgtggcctggcccagcgcacgcaaaaatccaccgaggaaatcgaaggcctggtcgccggtttgcagaacggcacccagcaagtggccaacgtgatgaacaacagccgcagcctcaccgacagcagtgtcgagctgacgcgcaaagctggtgtgtcgctggagaacatcacccgtaccgtgtcgaatatccagtcgatgaaccagcagatcgccgccgccgccgagcagcaaagcgcagtggctgaagagatcagccgcagcatcgtgaatgtgcgtgatgtgtcggagcagaccgctacggcgagtgatgagacggccaagtcgagtgtggaactggcgcggttgggcagtcagttgcagcagatggtcagtcatttccgggtataaaagccgcagtccctgtggcgagggagcttgctcccgttagggcgcgaagcggccctgatcaagttgatgcagatttgaagttgagagcgcagtgaatgcttggggctgctacgcagcccaacgggagcaagctccctcgccacaggcaaacttagacatactcggccctccgtgagttgggccttacctccagcacacttaccggaacacgtgggccttcggacgcgagtcgattgcgtcctttgagagtgcaaccccagccactaactggtgttgcaaaaaaaaccgccctaccaaggcggttttttattgcctgcgatttgcccctcagccctcaccttcctcaacaaacaccagccgattcccaaacgggtccttgatgctcatctcccgcgcgccccaaggcgtttcctcaacccctggcttggcataccgataatccttgcccaccaattgctgctgatacgcgtccaccccctgggcctgaatccgcaccgccgcgcccggcgacgcatcgccatggtgctcagtcaaatgcaacacgcattcacccagcgacacttgcaggtacaacggaaaactcgcttcaaaacgatgctgccaatccaccttgaaccccaaaaagtcgacgtagaattccaacgccttggcctcatcgaaaatccgcaggatgggggtgacttttcctaagtgcatggcaatcgctccgttcataagagcgcccactataaagacgaaaatccccgacgcaaatccccactgcgcgccaggaaacgcccctgccgctgaccgttcgcctgcccgtcgcagtagctcaacactccgttgacccacaccccatcaatgccttccgccgcccgctgtggttgcttgaagtccgccacatcgcgcacgcgcaaagggtcgaacagcaccaggtcggcccagtgcccttcgcggatttcaccgcgctcggccaggccaaatcgcgccgccgacaagccggtcatcttgtgcacggcagtgtgcaacgggaacaacccgacatcccggctgaaatgccccagcacccgtggaaacgcaccccacaaacgcggatgcgggaacgggtcctctggcaacccatccgaccccaccatcgacaacggatgcgcgagaatccgccgtacgtccgcctcatccatcccgtaatacactgcccccgccggttgcaggcgacgcgctgcgtccatcagcgaaacatcccactcagcggcaatgtcctgcagatcacgcccccccatgtccgggtgcggcgtcgaccaggtgatggtgatgcgaaacgcatcggtcacctgcttgaggtccagggtcgaagaactcgcagcatagggataacaatcacagcccaccgggtgggttttcgccgcccgctccagcgatgccaacaactgcggactacgcccccaattcccggcgccggcacatttgaggtgggaaatgatcaccggtgcctgggcatgtcggccaatcaaaaacgcctcgtccatcgcctccagcaccggctcgaattcgctgcgcaaatgggtggtgtacaccgcgccgaaggccgtcagttcttcactcagttgcagcacctcatcggtctcggcgttgaacgcgctggcgtaggccaggcctgtggataaccctagggcaccggcttcgaggctttcttgcaactgcacgcgcatggcggcgatttcgtccgctgaagcgctgcgatgcaggtcttgcatgtgattgctgcgcagtgccgtgtgaccgatcaatgcggcaacgttgaccgccgggtgagcctgttcgaccgctgctcgatagtcagtaaaacgcggatacacaaacgccgcagcgctgcccaacaggttcatcgggtccggcggatcactgcgcaacgtcaccggcgacgcactgatgccacagttgccgacaatcaccgtggtcacaccctggctgagcttgggcagcatctgcggatggcggatcaccaccgtgtcatcatgggtgtgcacgtcgataaaacccggcgccagcacacgcccctgagcgtcaacctcatgcgcgcccgatgcgctcgacaaatcaccaatcgcctcgatacgtccggcgcgcagccccacatcggccacatagcctggggtgttgctgccatcgatgatcaatgcctgacgaatcagcgtgtcgtacttcatatcagtctccaagcggcaggctgtcaggcccgccgcgataatcgtccagggccagcttgatccggcgcaggcgttcctgattgccatccggcgaggccagagccaactcggtggcgagcaggtcgatagccagcagcatgccgtagcgggcggcggtgggcttgtagataaaactggtttcggccggctgcagcggcagcagcacatcggccaattgggccaagggcgagtcggccagggtgatggcgacgatgcgcgcgtcgtagttgcgcgccaacgccaccacgtccagcagttcgggggtgaggccagtcaaggaacacacaatcaacgcatgctcaggccccagcgtcgccgccgtaacccgcatcatcaccgggtcatggcaggccgcaatcggatagcccaggcgcaccaggcgcacctgcaactcatcgctgcacaggctcgacgggccgcccatgccgaacgcatggatcatccgcgccttgcccaacaggctgaccgcatcgacaaaactggcctggttgaatccggagagatgctgacgcaacgtcgcctcgatatcccccaggatctgccgatgaaacgccgactgttccggcaaccccgccgggtcgaggaagcgactgccgacgccgctggcctgggccagttgcaggcgcagatcacgcaagtcccgacaccccacgctgcgcgcaaaccgtgacaacgtggccgtactgacctcggcccgttgcgacaacgcttccaggctggccgacgcggcaaaccccacgtcatccagcatcagcttggcgatacgcccttcgccggcgctgaaggcgtcctggcgagcgcggatctggtagaggatgtccatgggctctccgggttacaaaatacaggacagaccataagtcagaccgaaggcgaccaccgaaatcaacgtctccaacacggtccaggtcttgaaggtctggatcaccgtcatattgaagtattccttgatcagccagaagccgccgtcgttcacgtgggaaaaaatcaccgaacctgcgccggtggccagcaccagcaactcagggtgtggataacccaggcctagcgcgacgggcgctaccacaccggacgcggtggtcatggccaccgtggccgaacctgtggcgatacgcatcagcgcggcaaacaaccagcccatcaccaacggcgacaggtggaaggcatgggccaggccgagaatttcgttagtgacaccggcgtccaccaagatgcgattcaacccgccgcccgcgcccaccagcaaggtgatgctcgcggtcggcgccaggcattcattggtgaacttgaggatcgactcacggttgaagccctgtgcaatccccaaggtccagaagctcaccagggtcgccaccagcagcgcaatcaccgagttgccgataaacagcaggaactggttgaaaccggtgcccggcgtagagattacattggcccagccaccgatcatcatcagcaccaccggcaacaggatggtgcccatggtcagggaaaagctcggtaaacgggtacgcggttcgcgctcgatgaattggcgttccagcgggttttccgccggcagatgaatacgcggcacgatgaacttggcgtagaccgggccggcaatgattgccgtcgggatgccgatcaggatggcgtaaagcacggtctgccccaccgacgcgttatacgccagcaccgccatcatcgccgccgggtgcggcggcaccagcgcatgcaccaccgacagaccggcgaccatcggcagcccgaccatcaggatcgacacgccgaccctgcgcgccacggtaaaggcgatcggcaccagcaacacaaaaccgacctcgaaaaacagcggcagccccaccagaaacgcgatgcacaccattgcccaatgcgcgttacgctcgccaaaccggttgatcagcgtgcgcgccacctgctcggcaccgccggactcggccatcatcttgccgagcatggtgcccaacgccaccaccagggcgatatgccccaaggttttgccgacacccgcctcgtaggaacccatgatggtgtccgccggcatcccggccatcagcgccaggccgatggacaccagggtgatgacgataaacgggttgagtcggtaacgtgcaatcagcacgatcaaagcaatgatggcgatggcagcgtatgccaacagcccgaagcccggtgatgcggccatgcggtactcctcggaaagggtcacgtcgaattggttgtgaaactcataaatcattaccgaggattattttcaatttttatgaaagtaactttcgcccacaggtaagcgctgtcgcgttgggatatgcccgacaggcgtgaatgaaaattcgaggggtgttcttacatgaagatcggaggatgccggaaactcaagcgcagccgttgagtcttagaatgcgcaacccttcatcatcaggaaatcgaccatgattcgcacagccttcgccgccagcgccctgctcctcgccctgtgcggcaccgcttcggccgccgacaacccagcgctgaagaagtgcatggacagcgccaacaccaccgccgacatggttacgtgcaacgccaacgaagccaaggtgcaggacgcacgcctgaaccgcgcctacaagaccgccctcgccgcccaggaaggcccgcgcaagcagcaactgcaagacgtgcagcgcctgtggataaaataccgtgacgccaattgcgccttcgccggttccgccaccggcggcagcatcgaccgggtcaacggttccggctgcgtgctggacatgacccagacccgcgcccaggaactcgaagacctggtcgggccgtagtcagtcagtcgtggtgaaccctggcgcgcttgagcagcttcttgcaacgctccgacagatgcagcacccgcaggtgcttgccggccttgctgtagcgctcgcgcaaggtcatcaacgcggcaatcgccgagtagtcgacaaagctcaggtgacggcaatccagcgtcacctgggccgggtcgttggccgggtcgaactggttcaaaaacggcgtggtcgaggcgaagaacaacgtgccatgcaggcgatagagcttgctgccatcggcctccagatgctcatcggcatatagctcgcgcgcttgctgccaggcgaaattcaacgccgcaatcacgatcccgcacagcaccgccgtggccaggtcggtgaacaccgtgatcaccgtcaccgccagaatcaccagcacatcattgagcggcaccttgttgatcacccgcaaggaggcccaggcgaaagtctgctgggacaccacgaacatcacgcccaccagcgccgccagcggaatgcgctcgatgaacggcgacaggaacaggatgaacaacagaatcatcaccccggcaaacaccccggacaaacgcccgcgcccgccggagctgaggttgatcacggtctgtccgatcatcgcgcagccacccatgccgccgaacaggcccgagaccatgttcgccgcgccaagggccacgctttcacggtcggggtagccgcgggtctcggtgatttcgtcagtgaggttgagggtgagcagggtttccagcaggccgaccatcgccatcaggaacgcgtagggcgcgatgatgccgagggtttccagggtccacggaatctgcggcagcgccaaattcggcaggccgccggcgatgtgggccatgtcaccgagggtgcgggtcggcaggccgagcaggtacaccgccagccccacgccgaggatcgccaccaacgcaggcggcacggcgcgggtgatgcgcggcagcaggtagacgatggccatggtcaccagcaccaggccggtcatcacgtacaagggcgtgccgctgagccaggtttcaccacttttgaaatgctccaactgtgccagggcaatgatgatcgccaggccgttgacgaagcccagcatcaccgggtgcggcaccatgcgcaccagcttgcccaggcgcagcaggccgaaggcgaccatgatcaagccgcccagcaacaccgtcgccagcagatactccacaccgtgttgcaccaccagcgcgacgatcaccaccgccatcgagccggccgcaccggacaccatgccgggccggccgccgaacaacgcggtgagggtgcagatgatgaaagcgccgtagagccccatcaacgggttgaggtgagccaccagggcaaaggcgatgcattcgggcagcaacgcaaaagacgtggtgaggccggccaggacatcggcgcgcagacgggtgaggttcatgaagtaccagggtaatgcggggataaggcggggaatggtacggaattgagggagatggagctagtctcgaagaccgagtcgtgccaatcgggggcaagccccctcccacactagactgcactccatagttggaactcggtcaactgtgggagggggcttgcccccgatagcaacaccctggggatcaagtgaacatcacaccatttcgtggcgaatccactccaccaccgacgtacgcttcggcgcccagcccaacagttcacgggcctgcttgccgcgcacccggctgttggagcccaagccatagttggccatttcatagccccactcggcttcagcgtcggccaatggccaatcctgcggtttgcccaggttcagcgcttcggcgatggcggtggtcatgtcgataaacgcggcctcgctgctttccacgaagtagaaagtaccgggcacattcttggtcagagccaacaggtacaacgccaccacgtcttcgatgtgcacgttggaccagatgttctgcccggtgcccacgtggcgcactacgccgcttttacgtgcttgtttgagcagacgcggcaattgcacgctgtcgcgcttaacacccaggctgtggccgtagatcagggtgttgcagatcactgccgaattcacgccatcattggccgccgcgaggatcagattgtcgatggccacacgagccgccttgtcgaccgtcggctccggcaggttgccctcgaagtagatgacatcgctggccttgccgcccgacgcatccccgacaatgctcgaaccgctggtgtgcaggaacaccttgttcgagcccttcaacgccgcgagcagagtttccacggcagcacggtggtcgctgctggcggcgttgatcaccgcgtcggcctgttgcgcttgctcggtcaatacagccgcgtcatccagggtgccgatcaccgggttgatgcccagtgcggtcatctcggcagcctgctcggcgctgcgcaccaggccggtaacggtgtggccggccttaaccaggccggtcgcgatggaaccgccgataaaacctgctgcgccggtaatgaatacgttcatggaagactctcctggctgggtaagtgatggacccagtatcaaggcgtcatccctgacgaataagcccctggcgcccaattcactcttgcgctcaggtcacgaatcagcaggcataccgcgccagcttggcctggataaagtccaggaaacactggatacgcaacgccagctgcgagttgcggtagaacactgcgtggatcggctggcgatacccgctgttgaacgcctccagcaccggcaccaggcgcccggtctcgatatcgtcaatggtcatgaagttcgacaggcagcagatgccctgcccctccagcgccaactggcgcacggtttcgccgctggacgcggccacgccgggctggatcagccagcgatcgccctcaacatggcgcagcggccagtggttgagggtttcggtctgggtgaaccccaacagcgtgtgatcggccagctcggccaccgtggtgggcgtgccgtattgcttgaggtagccggggctggcgaggatatgcagcggcgtacagccaagagatcgcgcgtgcagggtcgagtcagccagggcgccgatgcgaatggcgatatcggtgctctgttccagcaggtcgatgatcacgtcatcgctgttcaactccaactggatatccgggtagaggctacgaaactcggcgatgtacggcacgatcccatgcagcatgaacggcacggcagcgttgacgcgcaggcgccccgccggtttctgctggcgtgatgacaggcgctcttccagctcttccatctgcgccaggatcaccttggcctgctcgaagaagtacttgccctcttcggtcaggtccatgcgccgcgtggtgcggttgatcagcgtggtgtcgagcttggcttccaggcgcgacaacgtgcggctgacagccgagggcgtctgcccgacttgctcggcggcggcggaaatcgaaccacattcaatcacgctgacgaagatctgcagctcatcggaccgggctttcacaggcgctcctcgttatcggttcagcgcagcttacaccgagaatttgaacacctgcgccagatgctgctcgtagcgcgccacgtcagcttcgatggccgggcgtttcatcacgtccacgcacaggaacgtgggcaggccggtcatgccgaggaactcgttggccttgtggaacgggaaatacaccgcgtccacgcccttggcttcgaagaagtcggtcgggtcgtcgaaggcttgctgcggcgcgttccaggtcagcgacaacatgtactgcttgccgtggatcaggccaccactgccgtacttctgcgaggcatcagaacgggtgcgaccgtcgctggcgtacaggctgccgtggccttcggtgaagacttcgtcgatgtacttcttgacgatccacggtgcgcccatccaccagccgggcatctggtagatggtcacatcggcccagaggaatttgccgacttcttcggccacgtcgtagccttcgtcgatgtgggtgaccttgacgtcgatgccagcacgatccaacgccgccacagcggtgtcatgcagggtagtgttgtagcggccatcggagtgagcgaactttttgccgccgttgagcaagaggacttttttcatggggtatccagaggggttaacaatgtctgccggcaggctatcgacattgccccctcggaataagcagcggtgaggcaaaatacatttgaccaaaaagcacgaatcacctgcgcattgttaaccactgatcagcagatgggcgcccagcaatgccatgccgatgaaaaatacgcgcttgaacaacaccgcactgatgcgctgacgcactacctgacccaaccacatgcccaatagcgccggcaccagcgccagcaacgacgcgttgatttcaccgccaccgagcgtgccgcgccaggccagccctgcggccaatgccagggtggacacagtgaacgacagccccagcgcctgcaccaactgatcacggttcaggcccagggcttgcagatagggcacggcgggaatcacgaacacaccggtcgccgaggtgatgatgccggtgatcaccccgcacacggggcccagccaacgttcagtcgcaggatttacgttgaacgtcggcaggaacaaaccgctcagcgcatacaccagcaacgccccgcccaacgcatggcccacccagcttcccccgctcatgcccagccacaacgtgcccagcccagtgcccaggaagatcagcagcagcatcggccacaagcgcctgagcaacgcactcaaatgaccaccggacgccagttgccacaggttggtgatcgtcgaagggatgatcagcaacgccgcagcctgcgtcggcagcatagccaggccgagcaagcccatggagactgtcggcaagcccaggccaatcacacccttgacggtgccggcgagcatgaaggtgccgatcaccagcagtgtcagggcggggccgatattttggtagaacgcgaggaaggtattcatggagtgattgtgcggtttttcgatgaggtcgaaaattcgccatatactgaggcagactcttgtttatacagaggctggtgccatgcactttgacctgatagacctgcgcctttacctgcacatcttcgacaccggcaacatcaccgccggggcggcccgcagccatttgtccctggctgccgccagtgcgcgtatccgggcaatggaggcttcgctgggtatcgcgtttcttgaacgtggccgccgtggcgttacccctacacccgccggcaaagccctggcccgccatgcccgcctgctgctgcaacaggccgagcacctgcaacaggaccttgccgaatacgccaacggcatcaagggccaggtgcgcctgctgtgcaacaccacggccctcagcgaatacctgccggagttactggcagactttttgcgcgaacaccccaacctcgacatcgacctgcaggaactgccgagcctgcgcatcacccaggccttgcgccagggcacggcggaccttgggatcatttccgacgcggtagacacccacggcctgcagaccctgccgtttcgcgatgacccgctggtgctgatcacaccgctggatcatccgttcaccgcagggagctttatcgatagcctgcaacacgactttgtgggcctcgccgcccacagcgcgttgacggtttacctcgaagaacaggcattgcacgcaggtttccgtctgcaaacacgcatccgcgccgaggggtttgacggagtgatccgtatggtcgcccgcggcgccggcctgggtatcgtgccccaggcggcactggagcgctggccgctggaacccaccttcaaggccccccccctgcaagaggagtgggcctgtcggaaactgctgctatgtgcgcgctcgttcgaacagctgcccggttatgccaaggccttgttcgacgccttggccctgcccttgcggaagaacccgtaatacaccgccgacaggatcagcaggaacggcacgccaaacaccagggtcatcttgaatgcctcggtgaaataggtggtgatcatcaccgcgcccatcagcaccagccccagcaacgtgctgtagggaaacagccgcagttggaacgacaatttcggcccaccgtgacgcttgcggtagcgccggaagaacaggtgagtgaggaagatcatgaaccaggtgaagatcgcgccgaacatcgagatcgccatcatcagggtgaacgagctttccgggtataccacgttgagcaacgtcgccagggcgatgcccgagctggacagcagcaacgcgttcagcgggatgccgctcttgctcaaggtgcccatggacttgggcgcgaagccggcacgggacaggctaaacatcatgcgggtagtgatgtagagctggctgttcatggccgacaacgccgcgatcaggatcacgaagttcatcacgccggtagcaccgggaatgccgatggtctgcatcaccgtgacgaacgggctctgggtctgcccggcctggttccacggcacgatggccagcatcagcgccagggtcagcaggtaaaacaccaccaggcgcacgatggttgcacggaaagctttcttcaccgcctgttccgggtcggcggcttcaccggcggccacggcgatcatctccacactcaggtagctgaagatcgacacgatcactgcgatccacatgccgctcaggccatgggggaaaaacccctcgtgggccgtgtagttctgcacgccgtactccgggttgccggaaccgaacaccacgtataccgcaaggatgatgaagccgacgatggcgctgatcttgatcgtcgagaaccagtattcgaagttgccgaaggtcttcacgctgatggcattgagcaggatcagcacactggaaaacgacacgatccacacccattccggcacgttggcgaaccagtacttcatgtacatcgccaccgccgtaacctcggcgcccaccgccagcacaatcgccgcccagtaggcgtagcgcaccaggaagccggccagcgggctgatgtagaactcggcataggcgccgaacgagcccgaggtggaatgcgccaccgtcatctccgccaggcagcccatcaacagcaaggtaatcaatgcgccgatggcgtagctcacaagcacgctgggcccggcatacccaatcgcataggcgctgcccatgaacaacccggtgccaatggcgccaccgatggcgatcatgctcatctggccggaagtgagctggcgcctcaggcccagttcgcggtgggtgatctcggcaaagccggtgtctggcgtggtcacgtggtgtgcccctttattattgtgattgcactattgaacggttgtcacagattccctgtgggagggggcttgcccccgatagcggtggatcagtcaacgctgtattggctggcacactgcaatcgggggcaagccccctcccacatttttatctgcgttgtggtcaggtgacgctgttgcggactttgaattgcgcctggtcccaggtgcggttgtcgaggatttcacccaggatttccacagcgtcaaacacctcggtaaagcttgtgtacaacggtgtaaacccaaagcgcatgatgcgcggttcgcggtagtcaccgatcacgccacgggcgatcaaggcctggatcaccgcatagccttcggggtgttcaaagctcacatgactgccgcgccgggcgtgttcacgcggggtgatcagcaccagttcatgagcagcgcaacgcgcctcgaccaatgcgataaacaggtcggtcaacgccagggatttgctgcgcaaactcgccatatcggtctgggcgaaaatctccagcccacattccaccatggccagcgaggtgatcggctgggtgccgcacaggtaacgcgcgatgccggcactcggtgcgtacgtcgactccatggcgaactgccgggtgtggccgaaccagcccgacaatggctgtcgcaccacatccaccagcgccgggttgacccacacaaacgcctgggcgcccgggccgccgttgaggtacttgtaggtgcagccaatcgcatagtcggcaccggcctgatgcaggtcgatgggcaccgcgcccgccgagtgcgccaggtcccagaggctcagcgcgccgcactcatggctcagggcggtcagcgcctgcatgtcgtacatgtagccggtcttgtagttgacgtgggtgagcatcaccaccgccacatcctggtcgatggcctcgggcaattcatccgggctgttcaccaggcgcagggaatagccttgttgcagcagttcggccaagccctcggcgatgtacaggtcggtgggaaaattgctcgcctcgctgacgatcactttgcgatttggctggcgttggcgctgtacgctcaacgcggcgctgagcaccttgaacaggttgatcgaagtggtatcggtgatcaccacttcgccgtcgcccgcgccgatcaatggtgccaggcggttgcccaggcgctgggacaggtccgcccagccagcactgttccaactgcggatcaggccattgccccactcttcggcaatcaccgcctgagcccgtgccaatgccttcaccgggcgggcgccgagggaattgccgtcgaggtagatcaccccctccggcaacgcaaactggcggcgcaatggcgccagcgggtcctgatcgtcgagggcttggcagtggcttcgagtggtcatgggttgtcctggtttttataggtaaggatggaccaaataatgaacgaacttttagagaattttcgtgcaaagtggcgggcaacaggctaattaagctgtaggaaattcgaatttaacccccaaacacgcggatttattctaaccatgattctcgacgccaccgacctgcgcctcctgcatttcctgcaacaggatggccgcatcagcaatcaggaattggccgaaaaagtcgcgctgtcaccgtccgcgtgcctgcgccgtctgcgcctgctggagagcgagggcatcatcagcggctaccgtgcggtgttgaacgcggagcagttggggatcgagctggaggccatcgtgcacctgtcgttgcgccaggatgtggaggattggcacgagacgttcatcaagaaggtgcaaggctggccggaggtcgccagcgcctacgtgatcaccggcgccagcaactatgtgctgcgggtgcaggcgcgcaacctcaagcacttttcggactttatcgtcaaccacctgaaccgcacggcgggggtgatggatattcgctcggagattgtgttgcagaagatcaaggatcgggatgaggtgctggacttggtggtacgcaaataaccgcaacaccatcggtcaaatgtgggagggggcttgcccccgatgagggagtgtcagtggctgaactgttcaatgacacaccgctatcgggggcaagccccctcccacatttttgaatcgcgtttaatcttccagagcgcggactcgctgcatgcgtttctgctccaccggcgcctccgccacctgcagctcaaagtcaaaatcgatctgcgcaaaccgcccttccacgccaaactcctgcgccagttgcgggtcgtcgctgaagcgaatctcggcgatcaactcatcccgtgtcgcataggcaaagtcatcatgcaggtacgggtcatccgaaaggttgatctgcgtggtcaggtgccgatgccccggcgccgaaatgaagaagtggatatgcgccggccgctgcccgtggcgcccgagctgatccagcagttgctgggtcggcccggtcggtgggcaaccgtagcccgacggcacgatactgcggaaccggtagttgccttgggcatcggtctcgatgcgtcggcgcaggttgaactccgattgcgtcggatcgaaccacgagtaagtcccccccgtgttggcctgccacacgtccacaatcgccccggccaacggtttgccgttggtgtcgcgcacctgcccgcgcatgaacagcggcaccgcgtcgtccttgccatcgtccagccgcgcctcgacctttgacagcggcgccccggccacatacaacggcccttcaatggtgcgcggcgtgccgccggatttgccggcttcctcatcggcggcgtccatcagcaagtccaggtaatgctccaggcccagcccggcggcgagcaatccggcttcctggtgcttgcccaactcgttgaggtagttgaccgccttccagaactcttccggggtcacttccaggtcttcgatgatgttcacagtgtcacgcaggatccggtagatcagcgccttggtacgcgggttaccagcgtcgttgaggttgccgctggcttcttcgagaaactgttgggcatgggcagtctgggacagtcggatggacatggtgcattcctcatcttgtagttattcgtttggaaaccggcctagcggtcgtcgtcatggatcgacgacgggtgccggcacagggcgttcacttcgatagccatgtaggggaacagcggcagttgcatcagcaggtcatgcagtgcctgcacgctgtcgacatcgaacacgctgtagttggcgtagtgcccggcgatgcgccacaggtggcgccatttgccttcctgttgcaggcgctgcgccagggccttttcatcggccttgaggctggctgcacgctcggggttcatgtcgagcggcaggttcacagtcatttttacgtggaacaacatggcaggcgcctcttagtgtttgtcacgacggaagaacgccaggcgctcttcatcgatggccaggcccaggcccggtgcggtggagacatgcagctggaaatcgcggtacaccggcggttcggtgaggatgtcttcggtgagcagcaacgggccgaaaagctcggtgtcccacgccagtttgttcagcgtaaggaacgcatgggccgacgccagggtgccgatgccaccttcgagcatggtgccgccgtacaggccgatacccgccgcttcggcaatcgcggcagtacgcaacaccgcacgcgggccgccgttcttggcgatcttgagggcgaacaccgacgcagcgccttcgcgggccaggttgaacgcgtcctcgacacactcgatggattcatccgccatgatcggcgccgggctcgacaggttgagccgcgccatgccgctgcggttattgcgcgagatgggctgttcgatcaggtcgatgccattgtcgccaagcaccttgcacgcccgcagtgccaccgcttcgtcccaggcctggttgacgtcgacgcgcacgctggcgcggtcgcccagggtctttttgatcgcgatcacatgggccaggtcgtggctgacttcaccggcgccgatcttcaatttgaagaggcggtggcggcgcaggtcgagcatcttttcggcctcggcaatgtccttttcggtgttgccgctggccagggtccaggccaccggtagcgcgtcgcgcacacgcccgccgagcagctcgctgaccggtaggcccaggcgtttgccgagggcgtcgagcaaagcgctttcgataccggatttggcgaaggtgttgccacggatgctgcgctccaggcgcaacatggccgcgttgatgttgctggcgtcctggccgatcagcagcggcgcgaagtgacggtcgatgttgaccttgatgctgtcggggctttcactgccgtagctcaggccaccgatggtggtggcttcgccgatgccttcgatgccatcggcgcagcgtaggcggatgatcaccagggtctggttttgcatggtgtgcatcgccagcttgtgcgggcggatggtggggaggtcgacgataatcgtctcgatcgactcgatggcgcaaatcggcatggcaatacccgttgggttctttattggttttagccgattctgtgccgtatttttcaaggcttccaatatagaatgggtctcgcacaataccctaaaggtatcaaaggagccgtcatggaactgcgtcacctgcgctacttccaggtgctgggagaaaccctcaacttcacccgcgccgccgaacgcctgcacatcgcccagccgccattgagccggcagatccagcaattggaggatgagctgggcgtcattttgcttgagcgtgggcgaccgctgcgactgaccgaggccgggcgttttttctatgaacacgccaacgtgctgctggagcaattgaacaaggtctgtgacaacacccggcgcatcggccagggcgagaagacgtggctgggcatcggttttgcgccgtcgaccctgtacggcgtgctgcctgaattgatccgccggctgcgtacccatgaggcgttggagctggaactcgggctgtcggagatgaccaccttgcagcaggtcgaagccctcaaggccgggcgcattgatgtggggttcgggcggattcgcatcgatgacccggccattgtccaacgcgtgctggtggaggaccggctggtcgccgtcctgcccgccggccacccgttgcttgatgcgcccgccaccctcgcccaactggctgccgagccctttgtgctctaccccggcaacccacgccccagctatgccgaccatgtgatcgcgctgttcgacgcccacggcctgagcctcaaggtggcgcagtggaccaacgaattgcagaccgccatcggcctggtcggcgccggcatgggcgtgacgctggtgccggcctcggtgcaagtgctgcaccgcgcagacatcggctacacaccggtggtggaggccactgcgacgtcgccgatcattctcagccgacgggtaaatgaccagtcgccgggtctcagtcattgcctgcaactggtggaagagttgatctagccacgcaggcgccgcgcatcgttgcgctgcaaggtctggctcggcgactcatcgaacagcttgcgatactccgccgagaaccgcccaaggtgagtaaagccccagcccagggcgatttcggaaatggtgcgggtagagccgtgctcgaggatttcctggcgtaccgcgcacagccggtgcttcttcaaataggccatcggcgacagggcaaaatatttgcgaaacgcatcgaacagcttgaaccgcgacacccccgcagcagcttccaggtcttccaggtgcacggtgtcccgagcgttgtcatggatgtactgccgcgcacggatcaggtaatgcggcagtttcacgccgaggacatcgcgcaattcttcggagtagttgttcggctgggccaggatcaggcctttgatcagcgagctttccaggtcgcgggtaaaggcggcctgctcgtataactcgctgccgtgttccagctcggcgatgaagtagcgcgccatgcgccaccaggatgccgaagcaccgtccacggcgtccatcaccgactcaaagcgcagcggcgcctcaatcggccgttgcagcaaaccttccagtgattcactcatcgccgcccgcgtgatcaccacctgcagcttgcggcaatcaccggaaatcgccagcacctgatgctcgttgggcgagatgatcacaccctgatcgcggttggagaccaggcgctcaccgttcgtgctcaactcctgctcgcccaccaacggcaggctcaagctgtagctgctgaagtgctcggcgtcttcgatgtcgatggtcacgtcggtgccgtattcgatcacgcccagggtagtggcgcgggacttgaacacgttggcgctgtggtgaaagcgcaggcgctccggcgtattggtggccaggcgatggggcccgcaaatgcccgacatccagctgcgggcgccttccaggtcgaagcgttgaatcgtttggctgctcatcagggtgcacccacggcggttaggctgttgcgcgctctggcggcgcgtcgttgttgttcgacagcaaataatgcgccacgccggcgcaatggccagcgggtggatagcaatagtcgactaagtggataaaccaccggtttttccggccattgccctgcaagacagtagcgcatcccgtcaccttcctgcaccgggttgggtatttgctgcccaattatccggcgcaggttcccccactaagcggatagcccgcaccctgcaccactgcctctaataaaccaccgattagcccctatcaaaaaggtgcctcccatgagtggtgcaagaagcgtcgagcagtggaaaacgtttatcgaaggttgcctggactttcgcccggtggatgaagtgtttcgcatcgcccgcgacatgttcaccgagccggaactgttcgatctggagatggaactgatcttcgaaaagaactggatctacgcctgccacgaaagcgaactggccaacaaccacgacttcgtgacgatgcgcgccgggcgccagccgatgatcatcactcgcgatggcgaaggccgcctcaatgcgctgatcaacgcctgccagcaccgcggcaccacgctgacgcgggtcggcaagggcaaccaatccacgttcacctgcccgtttcatgcctggtgctacaagagcgatggccggctggtgaaggtcaaggcaccgggggaatacccggagggtttcgacaaagccacacgcggcctgaaaaaggcacgcatcgagagctacaagggctttgtgtttatcagcctggacgtaaatggcagcgacagcctggaggatttcctcggcgacgccaaagtgttcttcgacatgatggtcgcgcagtccgccaccggtgagctggaagtgctgccgggcaaatccgcctacacctacgacggcaactggaagctgcagaacgaaaacggcctggacggttatcacgtcagcaccgtgcactacaactacgtggccacggtgcagcaccggcaacaggtgaacaccgagaacggcaccggcgccggcagcaccctggactacagcaagctcggcgccggcgacgccaataccgatgacggctggttcgccttcaacaatggccacagtgtgctgttcagcgacatgcccaaccccagcgtgcgctccggctacgccaccatcatgccgcgtctggtgcaggagcacggccagcaaaaggccgagtggatgatgcatcgcctgcgcaacctgaatatctacccgagcctgttcttcctcgaccagatcagctcgcagctgcgcatcatccgcccggtggcgtggaacaagaccgagatcatcagccagtgcctgggggtgaagggcgagtccgacgccgaccgcgaaaaccgcattcgccagttcgaggacttcttcaacgtgtcgggcatgggcacgccggatgacctggtggagttccgcgaagcccagcgcgggttccagggccgcctggagcgctggagcgatatctcccgtggcagccaccgctgggcaaccggccccacgcccaacagcgaagccatcggcattcaaccggccatgaccggcaccgagttcacccatgaaggcctctacgtgaaccagcaccgcaactggcagcagttcttgctcaacggcctcgatcaacaagcgctgaaactgcgggaggtgaactgatgaatgccccattgcagtaccggatcgagcagttcttctaccgtaaatccgagctgtgcgacgcccaggactgggacgcctatgtgcagctgttcgacccgcagagcgagttccacctgccgcaatgggactcggagcacgtctacacccgcgaccccaagcgcgagatgtcgctgatctactacgccaaccgctcgggcctggaagatcgcgtgttccgcctgcgcaccggcaaggcggcatcggccacaccgatgccgcgcacgctgcatttgatcaacaacgtgcgcatcgccgaacaggcagatggcacgctggaggtgaagttgaactggcacacgctgttctatcgcctggccacgtcagagcagttttacggccacgccacctacaccctgaaacctgaaggcgacagctggttgatcacccgcaagcatgcgttgctgctcaacgacaccatcaactcggtgctggatttctatcacctttgacagccgactgtgacttgtagtgagcgggcttgccccgcgctgggctgcgcagcggccccaaaagcttgggagcgctgcgcactccagcgcggggcaagcccgctcactacagttataaaatccatggagaacggtggatgaatcacaaagtagccttcagttttgccgacggcaagaccctgttcttccccgtcggagccaatgaaatcctgctggatgccgcgttgcgcaacggcatcaagatcccgctggattgccgcgaaggcgtgtgcggcacctgccagggccgttgcgagtccggcgactacagccaggattatgtcgacgaagaagcgctgtccagcctcgacctgcaacagcgcaagatgctcagttgtcagacgcgggtgaagtccgacgcgacattctatttcgactttgattcgagcttgtgcaatgcgccggggccggttcaggtcaagggcaccgtgagcgcggtggagcaagtgtcggccagcacggcgatcctgcaggtgcagttggagcaggcgctggactttttgcccggccaatatgcacgcttggcggtgcccggcacagacagttggcgctcgtactccttcgccaacctgccaggcaatcaactgcaattcctggtgcgcctgctgcccgatggggtgatgagcaactacctgcgcgagcgctgccaggtcggcgatgaactggtgatggaagcgccactcggcgccttctacctgcgccatgtcaccaaacccttggtgctggtggcgggcggcaccggattatcagccctgctgggcatgctcgatgaactggccgtcaacggctgcgaccagcccgtgcacctgtactacggcgtgcgtggcgcagaagacttgtgtgaagcggcgcgcatccaggcctacgccgcgaaaatcccgggctttcgctacaccgaagtgctcagcgcgccctcggacgaatggcccggcaaacgcggctacctcaccgcgcatttcgacctggccgaattgcgggacagatcggcggatatgtacctgtgcggcccccctccaatggtcgaatccgtccaacaatggctggcggatcaggcacttgatggcgttcagttgtattacgaaaagttcacgcagagtaatatctgaccctcagcacttctgaggggtagatgcggcgtgcactccaccctgagaaaaacaagtagaagggaatgttaatggcggatgacatggttaacccggtgggcctcaagcgtggcctgaagaaccggcacattcagctgatcgccttgggaggggcgatcggcacggggttgttcctcggctcggccggggtactcaagtcggcggggccgtcgatgatcctcggctacgcgattgccggttttatcgcgttcctgatcatgcgccagctcggcgagatgatcgtcgaagagccggtggccggttccttcagccattttgcgcataaatactggggcggctacgcaggcttcctggccggctggaactactgggtactctacgtactggtgggcatggccgaactgacggcggtgggcaagtacatccagttctggtggccggagatcccgacctgggtcagcgcgctggtgttcttcgtggcggtgaacctgatcaacaccctcaacgtgaagttcttcggtgaagccgagttctggttcgcgatcatcaaggtggtggcgattgtcggcatgatcgtgctcggctgctacctgctgttcagcggcaccggcggcccgcaagccacggtcagcaacctgtggagccacggcgggttcttccccaatggcggcatggggctgttgatgtccatggcgttcatcatgttctcgttcggtggcctggaactggtgggcatcactgccgccgaagccagcgagccgcgcaaagtgatcccgaaagcgatcaaccaggtggtgtaccgcatcctgattttctacgtcggcgcgctgaccgtgctgttgtcgctctacccatgggaccaactgctgcagacccttggcgcgtcgggcgacgcctacagcggcagcccattcgtgcagatcttctcgctgatcggtaacgacaccgccgcccacatcctcaacttcgtggtgctgaccgcggcgctgtcggtgtacaacagcggcgtgtactgcaacagccgcatgctgttcggcctggccgagcaaggcgacgcacccaaatcgctgatgaagttgaacaagcaaggcgtgccgatccgcgccctggcgatttcggccctggtgacgatgttgtgcgtggtggtcaactacgtcgcaccgaagagcgcactggagctgctgtttgcgctggtggttgcctcgctgatgatcaactgggcgctgatcagcatcacccacatcaagttccgcaaggccatgggcgaacaaggcctgacgccgtcgttcaagaccttctggttcccgttcagcaactacctgtgcctggcgttcatggtgatgatcatcagcgtgatgctggcgattccgggcatcagcgagtcggtgtatgcgatgccggtgtgggtggggattatctacattgcctatcggctgcgggttcgcaggagccacgcggtagtcaacgcgcagtaatgcctgtgggagggggcttgccccctcccacattttgtttacagcgtggagcgtactcgccacaactcggggaacagcacggtgtcgagcatcttgcgcaaataccccacaccctccgtgccacccgtgcccggctggaagccgatgatccgctctaccgtcgtcacatggcggaagcgccactggcggaacgaatcctccaggtcgataaacttctcggccaattgatacaggtcccaataacggttcgggtcgcgatacacctcgcgccacgccgcctccaccgactcatcgtgaaccgtcgccgccgtcgggtcgcgctcggcacgtttcggatcaatcgccaggcccgccttgatcatcaggttgatcgcctcgtcatacagcgacggcgtggcaatcgccactttcaactcgttcaacagctccggccggtgggcatggggccgcaacaacgccgcgcttttattgccgaggataaattcgatctcacggtactggaacgactggaaccccgacgactggcccaggaacgggcggatcgccttgtactctgacggcgtcatcgtggccagcaccgcccaggcgtgcaccagttgatcgaagatccgcgacacccgcgccagcatcttgaacgccggtggcagctcgcccaggcgcacgtgttcacgggcggccttgagctcgtggagcatcagtttcatccacagctcggaggtctggtgctggatgatgaagagcatttcgttgtggtccggcgacagcgggtgctgggcgctgaggactttgcccaggtccaggtaatcgccgtagctcatggactcggaaaaattcagttcggcgttatgccattcttccggaggttggtaatcggcagagaagggacattggctcatcgcgtgggctccttgagcgggcggagaatggcgcggacagggctcgcgtcgaggttggcaaaacgcagcggcagggcgatcaattcatagtcgccctcggggacgtcatcgagcacgatgccttcaagaatcgccatgccatggcgcgccacggcgttgtgggaatccatggtcttggactgctgtgggtccagggatggcgtgtcgataccgatcaagcgcactcccaggctggcgagcaactcgatggtctgtggggcgatggcggtgaagttcgaatcccattcggtaagcggcgcttgtggataagtacgcagcaacacacgctcgggcacgttatccacacggccctccaactgatgcggctgcaccagcgcgccgctgtccaggcaatgcagcacgcggcacggccccatatacacatccaacgacacctcaccaatggccgcgccgtccgcgctgtaatgcagcggcgcatccacatgggcgccggtgtgcggcgacaaggtgatgcgcccgacattcaccggacattccgggccaaactgccatacgcgctcttcctggaacggcgtatcccccggccaggtcggggtcgccgtactcaagggcgggctgatatcccaccacgtttttattgggttcatttgcaggctctcggcggttactggggtgaatgatacgagggccggccgcgaattttcttgcgaattctggcgtgaagggggaaatctttcgcacttattgcgaggaaatagcggattggtgatgggttatatcaaataaacaccgctgcgcttctgggcatcccgatgtcgagttcagaccactgacgcaacgccccaggccttagtgtggatccttccattccctgcctcggaggcatcatgtccaagcccatcaccgtactgcgcgacacccaccccctgccggtcctggacgcctgcaaatgggaaaagctcgaaggcgacccgcacaccgtcaacctcaacgcctacaccagcgaagacggcagcaagatcatgggcacctggatctgcacaccgggcaagtggtacgtggattacgtgaagtgggaatactgccatttccaggaaggctactgcatcatcacgccagaaggcatggagccgattcacttgcgcgctggggatatctttgtggtggaaccagggatgaaggggacgtgggaagtggtcgagacggtgcgtaagtattttgtgtttgcttgaactggcaatccgctgatttcaagaacagaaaaccgcctgtaacggcggttttttgtgcgtttcagcggctcttgccagccaaggggcctgtcggctccatgtctttaccatgctcaatagctacgctgaaaaaccttttttgattggcagacgttgggccgccaagcttcttggcttcggcgcaaaacgtctcgacccattgcgtgtctgatttctggtttgtcgctttcattaacccaagcctctgtgagccttgtacatgcgcccaatactaggtgcgctcaactgaaatcacaaggcggtgcttttcgtcataggtgaagccaagtcgcttatacgtctgtacgacgtctggtcgtggctcctgaatttcgattcgagagcacccgatgacacgcgcgtatgcgtcgatggcgccgagggcaagcgcagcgatcaagcctttcaagggatgttcgctatctgagttaccttcgagaagcacaatcttgatcgtgactttactgtcacgaggcgttgcgtaacagaggccacatagttgctcatcgtgccagatcgacaaatcaaaccctttagcgtccaaggccctccaggccggaacatcctcccagggaaattgggcgtcacctccccagaggtaaaacgcctctatggcccgaccatcaatcacatcgaagcgtactttcgcagcgtcgagccactgatggcccaatgcattccactgctcgatgaatgaagccagtgccgcctttctcgattgagattgaaagaccaggtacttgagggagttcgagtatcgacgtgccattacgatcagattcttacgagtagagtggaaagatcagaaagccgcgttaacaacgaaagggcgcaaaccgtagcaagatcgggtgtagccttgggccaacgatgaattcaagatttttcaggcgtattcgtcacgagcaatggagccctccccatgacggctgaattcgacaggcaaaaaatcgtcatcttcaccggctctggcatcagtgccgaaagtggcctggacacgttcaacgacgaaaccggactgtggatggaccatcgcgtcgaagacgtcgctacgcccgaggcatggcatagacaccccgcggacgtgctcgcgttctataacgcgttgcggcacaaggcgtgggctgcgcagcccaatgcggcgcaccgcgccctagcggagttggagcagcagtttgatgtagtggtgattacgcaaaacgtcgacgacctgcacgaacgggcagggtccacgtgtgttctgcatctgcatggtcaaatcaacctggcgcaaagtacggtcgacgagcaactgatttacaagatcgacgataagccgatcttgctcggcgacacctgtgaaaaaggcagccaattacgcccgtatatcgtctggtatggcgaaaatgtgccaaatatcgagaaggcgctgcagcactttaaaaacgcagagaaagtgctggccgtgggcacatcactgaccactcaaccggccgcaggcttggttacgaaagccaggcactctgccgaaaaggtcctgattggactggctgtttcgcgtaagccctacggctacgaattcatgcgaggaaaggcatcaagcctggtgccttatgtggtgggatgctggctgaaaggccaaaaggctcgttaaccgcaaaaacccgggggcccactgaaggcaggctcccggaaacgcccctacttgggcttgcgatagctgttgatgatcgccgaaaagtccttgcccccttccccgcgctggctcatcgattgatacaactgttgggccacggcgcccaggatcacgggttgcttcgcctgacgtgccgcttcggtagccaggcccaaatccttgagcatcaggtccgcaccaaacccaccggtgtagccacgcgacgacggcgccgtttcgatcacgcccggccatgggttgtaggtgtcggaactccagcaacgcccggtcgagctgttgatgatccccgccaacacctgagtatcgatgcccaacgcgtcgcccaatgccatggcttcgctgacgccgaccatgctgatccccaacaacaggttgttgcagatcttggcgatttgcccggtacccacctcaccgcagtgcacgatgttgcggcccatctgcgccagcaccggttgcagggtagcgaacagttccggggtggcgccgaccatgaaagtcagcgtcccagcagcggcgccaccggtgccgccggagactggggcgtcggctacggttacgccttgcctggccgccgcagccgctacgtcgcggatggtttgcgggtcgatggtgctgcaatccaccgccggtacgcctttgccgatgccggcgagtacaccgtcttcattcagccatacgctgcgcacatgggcggcggcgggcagcatggtgatcaccagctcagcgtctttcgccgcatcgcgtggtgaatcgctgatggtgccgcccaactcggccaattccttgagtaccacctggttcaagtcgaacaggttcagcgcgtgacctgccttgatcaggtttcgggccatgggggcccccatgttgcccaagccgataaatgcaatcttcatggttgtctcccggaatcagcgcaggttgatggtggtgttgacgccatcgttgaccgtgtcgtcatcgaaccagcggctggtgacggtcttggtctgggtgtagaactgcaccacttgcttaccgtacgggccgaggtcgccgagcttggagccccgggagccggtgaagctgaagaacggcaccggcaccggaatcgggatgttgatgccgacctggcctacatcgatttcgctctggaatttacgcgccgccgcgccgctctgggtgaacaggccagtgccgttgccgaacgggttggcgttgaccagggcgatggcttggtcgagggtgtcgacttccagcaccaccagcaccgggccgaagatttcctcggtgtagatacgcatatcagtggtcacgcccgagaacagggttgggccgacaaagttgccttgctcgaagcccggcaccttgatgtcgcggccgtccagctccagcttggcgccttctttcacgccgctttcgatcaactccaggatgcgtgccttggcgcgcctggaaatcaccgggccgacatcggtgccggcctcgctgcccgcgttgaccttgagtttctgcgccagcgccttcagatccggcagccattgcttggacgcacccaccagcaccaccaccgaggtagccatgcaacgctgacccgccgcgccgaaaccggcaccgaccagggcattgagggtgtgctcacggttggcatccggcagcaccaccgcatggttcttggcgcccatcatcgactgcacgcgcttgccatgtttgccagccaggtcgtacacatgggtgcccactgccgtcgaaccgacgaaggacacggccttgatgtccttgtgggtgcacagcgcatccacgacatccttgccaccgtgcaccacgttgagcacgccagccggcacaccggcttccagcgccagctccaccagcagcatggtcgacagcgggtcctgctcggacggcttgagcacgaaggtgttaccgcaggcaatagccatcgggaacatccacagcggaatcatcgccgggaagttgaacggggtaatgccggcgcacacgccgatgggttggcgcagggtgtaggtgtcgacaccaccggcgacattctcggcgaattcgcccatttgcagggtgccgatggaacacgcgtgctccaccacttccaggccacggaaaatatcgccttcggcatcggcaatggtcttgccctgctcgttgctgagtaccacggcaatgcgcttggaatgttcgcggatcaaggcctgcagcttgagcatgatgcgcatgcgcgcgccgatcggcgtcagcttccaggtctggaaggcgcggtgggcggcgtcgatggcggcgttgacttcatcggcggtggcgaacgggactttggccagcacctcttgggtggcggggttgacgatgtcttgccactcggtggtcttggactcgacccactcgccgttgatcagcaacttgacctgttgcacggaaatatcggcagatgcgttcatgtggtctccaattcttatttatatgcagagaaccaaggccaggggtgtgctctcaatagctgacggtcgcgcccgcgtcccagcttaaatcgggttcagcctcaaatatcttcattcgggacttggccctgcgggttggagctgtgatcacaccagtccgcgttgcgggactcgaagaggcaaaggcatcctcttcgtcccgcgccttgactgatgcgatcacaactccaacgcgatccgccatctattgagagcacacccctatcgccttgaagaatgaggcgttcggactgtttttggagtatagatgtgcaaatctctaataagaacgcacataaaagccggaccaatatgcaaaaaaacatcacgtcgctgggctccctgaactgggatgacctgaagtttttcctcgaagtggcccgcacccgcaaggccagcgtggccgccaagcgcctggcggtggactacaccaccgtgtcgcggcgcatcagttcactggaagtgtccctcggcaccctgctgttcgaaaaatcccggaccaacggcttcgtcctcaccagcgaaggccagcgtttgctgggctacgccgagtccatcgaaagcaccctgcacatggcctgcgaacaagtctccggctccggcgtggcgctgtccgggcacgtacgcatgggttgcaccgaagggttcggcagcttcttcgtcaccccgcaactgagccacttcgtcgacacctacccggccatctcggtggacatcctgcccctgccccacttcatcagcctgtccaagcgcgaagccgacatcgtcatcgccctggagcgcccggaacacgggccgtatgtgtgctgcaaactgtgcgactacaagttgcagttgtacgcgacccaggaatacctggaccaacatccgcccatccgcaaaccttcggatttggccgagcatccgtttatcagctatgtggatgatctggcgttcagctcggagttgctgtacctggcaaacgtagtgcccggggccagtgccagtttgcgcagcaccagtgtgatcgcgcagtacgtcgcggcgcagcaagggcggtcgatggcgatattgccgtgctttctggcggcgcaggatccacggttgttaccggtgctgggggagcagatttccatcactcgccagttctggatgtattgccgggaggatctgaggaagttgaagcggattacgttgttgtgggactacatcagggaggtgacggagcagaatcaggggctgttgatgggggagacgcgggagatgcggtttgaaagggaccaagcaatagagaaacactgatcattcaaatttcgcgccacccgccaaaccatggcaattcgcctccatagctgataaaaagcagattactaaggaggaaaactgtgaaaatcaccattaagaaagattacaaatctattcctgcaggagttgagtttgacatcccagacttttgtgttttgacaggaaaaaacggcagtggcaaaagtcatatcctcgaggctatcgcaaacccaacactctcagatgtaagcctaaatggagcgagtacaaacaagatattacatgtagggtttaatggcctaaacccacaagtagacgagcaatgcgactcaacccaagtactgcaaaacgttaacaactggtggaaccagatacttggaattatcacacactacaaacagatttcacaaaacggccaaagattcaacaatatatttactgaatacttaccccagcacggccccaaccctgtcttatactcaataataaaacaaataatggaaaagtcaggaaaaaacctagaaaatctaaaccaggaggacgttctaaacaatattagcttcgtcgaaaccagcaacaacaccttgtttttttcccaatgcgcgatgatctttaaggcatatcacactagacaggtaaagaatgagttctccgaattcagagccgcaaaacatagcggtactggaattcactttctcagccaaaaagatttcatatcaaaatatgggcctcctccatgggaactcatcaatgagatactagcccgagcaaaactaccctatgaagtgtcgaaccctgaacttgtagattacgacctcccttatcaacttagacttatcgacaaatctaacaacgtagatatttcggtcaacgacctttcatctggcgaaaaggttttaatgtcgttagcattagcaatttacaacacacaagaaggaggaactcgcccagacatcctgctactcgatgagccagatgcacccttgcacccccaattttctaaacttcttatagatatactcatcgagacaatagtgaggaaaactggcgtcaaggtaattatcacgacccactcgccctcaacagtcgcgatggctccagacaacagcgtgtttgaaatcaatagagacactaaagtcccattcatggttagcaactcccatgcagtcaatacattgaccgaaggaatagacttcctaaaagtatcattcgaaaagagacggcaaattttcgtagaaagtaaatatgacgtccaatattttgagcgccttttcaaccttgctcggcgtagatgtgatttttcataccatccaattttcttagagcctcatagtggatcatcgaactgcaccgatgtcatcagcatagttaacagactatactcaacaggaaacgatctcgtttggggaattattgacttcgataccaccaatacaccatcagacagaattgaagttcttggaaccggaaaaagatacgcagttgagaactatattttagatccactctatgtgtgtttaagcctaatccgatcagcaaaaaaaacatatgcagactttggagtaacaggaagcgttgcgacgtatacagaagcgatgaacctcaaagaagaagagtgccagacgatagtggacaacttcttaactcaaatcaatcttccgctagccgaacttactcccacccgactagataacaattacaccatcaactaccctaaatcttttctattacatcaaggacacagctacgagactctactaatgaatcgtttcccagaactgaagtcaatatctcgaggcaatggcgattcagcattgaagttaggagtgatgcagacagtcgaagagtaccctcagttccttcctagagagatcttcgaaaccttttccagagtcttaaatgattagtagctcaagcgttggtagcagacaagtgaagctgttaatacctaaagtcagatacctcaagaaaattccctttaaattgcaggatatttcctagagaatctccacagtattgcgtcataggatttgagtgtctagcctcctcgggtcgctgcaaacagcgactgggtttagcgacccgagaaacgtaggttcgacctcctcaactcatttggccggcgtttttgcctgccttatcgtgttatggcggctgtgcgcgggagaccttcggggtctaccgggttccctaggttaccggttcgctaacctgcgtacagctgccacctctccatgtttagcgacgtgccgtggcggtttctacttgttaacctaaggaaaaaccatgtccaagatcgtccccgatccaccgctttcctccctcaccaccctcggcgtcgtcaccttcggcgattacggcgaaaacgaaaaacccctgttccgcgtcaacgccggcatgcccattgaggaagcgttagagcacgcctccaccctgcttttctactccaagaaactcgcgatggaagccgccatggatgtacgcggcgagcaatacgcgtgggccgcgcattacctgtgtgagatgggcaaagccgtcgttgatgacctgacccaagccatgacgccaagccgttaagcgcacgcagctcaaatgtgggagggggcttgcccccgatggcggagtgtcagaaccccatgtactggctgacccgcagctatcgggggcaagccccctcccacattttgattgcatttcaggttgggactgggcgaaacctatcagtccgcaatcaccacaatcgacacccgccgattctccgtgcgccctgccgccgtatcgttggacgccaccggctcgctgctacccagcccgcgcagttgaatgttttcttccttcatacctacaccggtcaacaccgtcgccacgctttttgcgcggcgcagggacagttgctggttgtaggtttccttgccggacgcatcggtgtggccgtcgacgcgcacgcgttcgatgcccacgcccagcagggctttgccgatgcgttggacgatgtcggtgctgggttggttgagcgtctcgacgtcgctgccaaacagcactttgccggacaggccgaaggcccagccttcgtcggtcagttcaaagccttgctgcttgaggaccgcgacttgtgccggagtgaggcctttgggtggggcggtctggcaaccgccgagggcgagcagtgccatcagcagggtgataaacatgaagcgcgcggttgtgaacaaggggtcaactcctgtgttgaacgttgacgacggggttctccgactccgccgtttgctggccgcccgaggacaagcgcttggcctggtacatcgccgcgtcggcggcattgagcaaggtgccaggtgtggcgccatgatcggggtagatagcgatgccgatactgagggaggtcaatacctgcgtgttgccgggcacagggatgggcaggtccatgctggcgatgatcttgtcggcgatacgctgcgcgtcttccaccttgtgcaacggcgccagcaggatggcgaactcgtcaccgcccaggcgcgcgaccaggtcatcctcacgcagttgagcacgcacgcgctcggccaccgctacgagaacggcatcgccggcggcgtggccgaagctgtcgttgatctctttgaaacggtcgctgtcgaggtagagcaccgccagttgttccttggccttcgccgcactgcgcagcgcacggatcagacgcccttcgaagaaggcacggttgggcaggccggtgaggctgtcgtgattggcctggtgggcgagggattcgttttcgctttgcaggtggttttgccaggcttccatctcgccgagcaaggcattgaagtcgctgcccaggctgtccaactcggcgattcgcgccggcggcacgcggcggtcgaagtcgcgctcgctacgggcagcgtgggccacggcggcgaggctttgcagtgggccggtgataccgcgcaacaagcgtcgcgccaagtgcagagcgatccaagcactgagcgcggtgcagatgaggatcccggccaggccgctgagcaggaagcgcaagaggctaccgccgtgaccggtgaggtgagtgctgccgatggctcgcccttggtggaggatcggctggctaatgggttgttcaagcagggtgtgcgccagttccagttcaacccgcgagagcatgccggtatccggacgtatccactgcgccagcaacttgccattggcgtcgaagacttcggcctgggccacttcttcggtggaggcgatcaggctgagggcctcggtggccgccgcgctgtcgttgaacaccaccgccgcttccacggtgtagttgatggagcgggcgatcaggtgcaggttgtgttcggcatacacccgcaacgccagcacgcccagcagggtcagcgagatgctggccagggtcaccgccaccagtgccagcatcaggtgccctcggccgatgaccgagcgcaatgtcggtcgcacagtatcggccctcatggcgcaggcgctcggcgacgggacaactgcagcacactggggtgaatacgcacgccgctgcgcgccacggagtcgaggttgacctcaaaggacacttgctcatcactcaccctaaggcagaacaggctacccacggtgcactggtcgccgccttcgctgatgctgagcaccgggtgaccgatcaaggaggtgaacaactggctacgctcatcgacactgagcttgccgatgtacaccgcatcgcacgcgttgacgatatcgggatggttggccagcaggcgctgcaccaccaccggacgaccggtggcctgggtggtgcctttgatcaggtcgtcggtgtattgggtggggccgacgatgcacaggcgcaattgcgcaggctcgaccggccagcgcgcataactgaggataccgagtaccacttgggtgactgcctgggcgcgctgggcggcgaggtccgcaggggcgggcgcctgggcgaaggtgtgtggcgcgagcacacacagcaccgccaccagcagcaggcgtctccagctcaaactgcgctctgtgggcgagacagccacgttcatgcagcgattctctcaggtgttttttagatgatgccgcaacgatagcacagcggcgcaaaaccccgcgaagagtaggccttcgcgggggccgctatttttccagaaaaatcagtcgactgaatcagaaaaatgacatgacctgtcagtcagttttttccggttcgtggcctaattccagcatcaacccactcaagcgcttgaccttgcgcctgaccgcctcttcaaacacgccgcctcggggctcgatcaggctgaaccagcgcttggcccgcgtgatgccggtatagatcaattctttggtgagcaccgggttcaatgcatccggcaggatcaatgcggtgtgggtgaactcggagccctgggatttgtgcacggtcatggcgtacacggtttccacatcgttcagacggctaggcagcacaaatcgcacaccgccctgaccgtcgttgcgtgggaaggcaacgcgcagcacctgggggccgccgtcgctttcgggcaatttgagggcgatgccgatatcgccgttcatcaggcccaggccgtagtcgttgcgggtcatgagtaccgggcggccttcgtaccactgctcgtcgccttcgatcaaacgcaccttgcgcagggcggcagtgatgcgcaggttcaggccttccacgccccaagggcctttgcgtaccgcgcagagcagttggaatgcatcaaaggcgtgcagcagttgttgcgcccagtgggtccaggcgtcgctttcgcgcggggtatcaagtgacggacgggcgctttgcagcaggttcaggtaatagcgataaccgtgggcaccatcaccctgcccgtccagcaccaggcgctccagggcgtggtcgtgctcgcccttgaggctgatgcagaacaggtcactgtgactgcgcgccgccagcagcttgcgcgcctcttcggcattttgctggttgacccaacgcgccagttggccgatgccactgccctcgccgaaacgccgcgagtaacgcagcatcaccacttgttgggccaacgggtggctggcgtcgaggtcttcctgcaggccgctggcgctgaggtcttcgccgctgaccgattgcagccattggcgggtctcggcgctgtagaagccagcttcggcgtcgcggcacaagtcaccgagcacggcgcccgcctctaccgaagcgagttggtccttgtcacccagtagcaccaggcgtgcatggggcggcaaggcgtcgagcaggttggccatcatttccaggtcgatcatcgaggcttcgtccaccaccagcacatccaaaggcagcgggttaccgaggtggtggcggaagtgccgcgtgcccgggcggctgcccagcaggcggtggacggtggtgacctgggtcgggattttttccttcacgttgtccggcacattcagcgacagcacttgctggctgatggactcggtgaggcgtgcggcagccttaccggtgggcgcggccaggcgaatgcgcaacgggctgccagcctcaacggccggcgcttgcagcaacgcgagcaggcgcaccacggtggtggtcttgccggtgccggggccaccggtgacgatgctgaatgcaccgcgagtggccagggcgcaggcgagtttttgccagtcgatcacgccgtccggcggcgcctggtcgaacaaactgttcaagcgctgcggcaaatcggcggcgactttttcctgggtggcgaggcgcaggcgcaaggcgctatcgatgcgccgctcgtaggtccagtaacggcgcaggtacaggcgtttgccggacaggaccagtgggcgactctgggcggattcgctgccatcggccgccaacgcgaccaaatgactggcggccaaagcgtggcaccagtgggcgccgtccagcccctccagcaactgcgacggcagcagcatggcgccggtttgcaggtcaccttcaggcggcaacgacagggcgaagtcgggtgccttgagcgtttcgaacaggtcgaggcagacgtgaccatggcccaattgatggctggtcagcgcggcggccagcagcaccagcgggtcagtctgtgggtcgagttcgtgcaggaagccgacgaaggctttgtccaacgcacgcaaccaaccgcgatcgacccaacgctccagcaattgcaccaggtcggcggcgcggctgaggggcgtcagctcctcaagcggtaacggcgacaggctcataacagcactccttgttcccaggcgggctcaaccttgggcgggatgggcttgccctggaacagcaggtcgaggctttcgatgagctctcgtgggggccgggtgaaatacgccccctggctagcggattgagtgccgcgcaggaaaatgtacagcgcaccaccgacatggcggtcgtagtcgtagtccggcaggcgcgccttgagttggcggtgcagggccagcaggtaaaggacgtattgcaggtcgtaccgatgctcaaggatcgactgttccatggcgtccggtgtgtaggcggaatcgtcggggccgagccaattggatttgtaatcggccacgtaatagcggccgccgtgctcgaaagtcaaatcgataaagcccttgaacataccgttgagcaacaccggttcggcggcaacgcgggagacgccgttgtgggtgtattggcatacaagcttgtcgagggcgagtacgtcgactttgtggctggcgaaccagaactccatctcgatctggtactgctgcaacccgctgagggaaacgtgaccgttttccaccggcaatggcgtttgcagcaggtggccgagccagctgctgagggtgatgatccagccttcccaattgcgccggttgcagcgagcgcccaccgccttttcgattgcctcgggcgtaacgttaaaaccgtcctccccggcccattccagcaggccgtgcagaaaggttcctgggttagggccgcgtgggaaacggtgaatatcgccgccggacgccaccacttcgcggggtgcgtcggggtcgagacgctcgtcatcgaacagcttttgggcctgtgggctttccggtgcttcgagaggggcggcgctcatgctgtcgccgatgcgcaaggcgctgtaggaagcaatccaccagttttccgccgccttacgcttgggcaacaagggcgcccgcagtgtggcgacgttaagcggtggatggaaaaggacgtcttgcgcttcgggcaccagggcgtagttgattgcagtgcaaccttcttgaaggtccaggagccagcccgccaaaccggcggattcacccagcgatgcgccggcgccaagcaaatagcccagtgccgaaaggtgcagtacggagctattgctattgccgcgcttgaggtcggcgatgcccagccaacaggcatgtttagcgcgggtcagggcgacgtagaacagacgcaggtcttcggcgaggcgctcgttgtcggccttggcgatcaactcgggcgtcgggcgcaggctgacctgggatttgccgttttcatcatggtagtgaaggggtaagcggctgccatccacgggtttggctgagcaaatgaatggcaggaaaaccagatcgtattccaggcctttggacttgtggatagtcaccactttgaccagttgctcatcactttccaggcgcaggatctgttcctcgcctgcctggcccgaaagcgccaggtgttcggccagatggcggatcagcgcctgttcaccgtcaagctccgatgcggcctgttgcagcagttcgctgaggtggagcaggttggtcagcacacgttcgccatcactgcgcgcgatcagggtttgcggcagtttgaagtcatgcagcaagcgccgcagcatcggcagcacgccttgggtgcgccagattgcgcgatagccacggaactgcatgacgcggctttcccacgccagttcgtcctggttcagacgctccagttccggcaaagacaggttcagggtgacgcaggccaacgcggcacgcagcgggcgctccacgtccggttcggcgcaggccttgagccaggccagcaggtcgtgggcttcctgggcggcgaagaccgaatctttgtcggacaggtaaacactgcgcacacctcgggcagccagttcggcgcgcaccgcctgggcttccttgccgtcgcgcaccaggatggcaatgtttgacggcagcacgcctttgaagctcgcgtccggttgcaggaaaccggcagtgccttgttgcccaccgttgagcaattcaacaatgtgcgtggcacaggccgccgcaagttgctgacgatacagcacgttggaaatcggctgatcggtaggcaagtgccagaggttcaacgccggcaacgtgtgcccatcgacctgcaagtgttccttgcggccttgggacagcaccgaatggaacggcacggggttttcgccatccggctcgcggaacaggaacgcacctcggcccgtttccgcacgctggaacacatggttcaccgcctcgaccatcgcatggctggagcggaagttggtacccagggtgtgatggcggccggtggtggactggcgggcgcgcaggtaggtgtagatgtcggcgccacggaaggcgtagatcgcctgcttggggtcgccgatcaggaacaggccgctgtcgaggtggttttcttcgatgcggtagatgctgtcgaagatgctgtattgcaccgggtcggtgtcctggaattcgtcgatcaacgccaccgggaactgctcgcggatcacgctcgccagacgctcgcctccctcggattgcagggcagcattgaggcggatgagcatgtcgtcgaagcccatttcggcgcgtcgacgcttttcctcttcgaagcgtttgccgacccagccggcggcgtgttgcaggactgcggcatcgggcgtcggcagggcgtcgagggcggccttgaggctggccatcgcgtcgataccgggatgctgcggcggttcgcccttccaggcttcggccatgccgtcgggtgtcaggcgagtgaagccggtgccgatatcgagttgttcgagggtgtcgtcagcagcccaggcgctgatcttatcgaaccagggctcgaagtaacgggcttgcatcttgcgaccatcgacggctttggccgccacggcttgcaggcagatatcacgtagctcggcggcccattgctgccacggcgccttcagttgtaccagcgcttcacggcgttcttgcaggcaggcgttgatcagctcggcgggctcgcgggtctcatcggcgggccgttcgctgccgaacagcgcacgtacccgaggcatcaacgcggcgggcccgccccagttgttgcgcacccagttgagcgcatcgtcgtgcatcgggtagcagaacagccgccagtagtcgcgcagcacttcaccaagcaggtcgctgtggtcggtttccagggtctgggtgaacaggctgccactgtcgaaggcgtgctcgcgcagcatgcgctggcaccaactgtggatggtcgaaacggcggcttcgtccatccattgcgcagcgatgtccaggcggttgccgcaggcgggccattgttcgagcgggtattcatcgcgtagatcggcgatcagagcgtcgggctgttcaatttcttcgcggaagaagcgtgctgcttcagccaggcggatgcggatgcgttcgcgcagctctttggtggcagcatcggtgaaggtcactaccaggatttgcggcggcagcagttcgcggtcaaagcctgattcatcgccaccgtggccgaggaccaggcgcaggtagagggcggagatggtaaaggtcttgccggtgccggcgctggcttcaatcagctggctgccgttgagcgggaaggccagggccaagggtttgcgggtcatgcgccggcctcctcaccggtgagtgatcgccagggggcgttgagcagggggcgatacagggtttcgcaccatccttcgaattcttcgctggcgatgagtgtggcgtagtcggggaattgccgggtgagcgctggggtttcgcggcgctcgccttcgttattgagcccgtcaccttcataggctttactcgcagccgcttcggccttggctggatcggtttggccgagccacgcaaacgcggttttgacggcaaggggtagcggtttgctcatccctgtatgccaggccagcagtaggttgccgaggatttcctgggcatgggctcgatccagcggtggcagcagcaaggtgtcgtcgctggccaccaaggcggtgcttagcggcaggccgcaggcgcaggccactacgtgattgacccagggccgaatcaggcgatgccacttgcgggtcttgatcgaaccgatgctgttggggatggtggtgacgctcagcaacccgccatcactgcgtcgatgcagcccgctgatccagccttccaactgaatgccgcgatgctcaaaactgatcggctcggcgccggggtgcggggtgggccagagggccaataattgttggtagcgttgcagcaggccaggcaagggttcgatcagttcgttgcgcaggcactcgccgaaacccaccatcggcaacaggccactgccttgtaggcgcaaagcctgggcgttcagggcctggtcgaagtgatcgggctcggtgagtgctgcgctaagcagactgtcgctcaggctgtagcgttgcagtgcgtcgagcacgaagggttcttcgtcagccagcggtacttcggcggcctcgaagaacactttcagccgttggctgaagaagtgtttgaccgggttacgcaggaagtcctgaagctggccgaggttcaggggctcgtcctgttgatgaggtgccaggacgggttctgttgcggtggcatcggctgcctcgtggagcaactgccattcgcgggcatagctgaacagcacatcgccctcatggaagtagcgagcgctgaatggttgcagtgggtgctcttgagtcatggcatcgatcagcggctcgtcactgtcagcggagtgccagccactggccagatggtcacgcagttggccgatcaacaccgaggccgggcgatcactgttgtcgcgaatgctgcggccaacccagctgatatagagctggtcacgggctgaaagcagcgcttcgagcagcaggtagcggtcgtcttcgcggcgtgaacgatcaccggggcggtagtcactgcccatcaggtcgaagtccagcggtggttgagcgcgcgggtaatcgccgtcgttcataccgagcaggcacaccagcttgaagggaattgcacgcatgggcatcagtgtgcagaaattgacagccccggcgaggaagcgttgggacaggcgcccttgatccaaacccgccaaccaggcttcacggactacggtgaggggtaagtcatcgtacaggccaacggactcgcaggtttccagccacgtttctctgagttgttcgagttggcccaacaggtagtcgtcgtgttcgctactcggcaggaaaaacagttgcatcaagcgttgcaggcgttcaccccactccttggcgggagcgggttgcgacagggcttggtgcgcatcgttgagtgcgtcgagcaaggcgaccaacgggccgatcaggacagcgtcgagtccaccgatttcgtcgtaaggctcgataccggcgcacgctgcgccggtgcctacggcgtaaccgagtaacatgcggcgcaagccgaaacgccaactgttttgctccagctccgttggcaggccgaggccggcacgttgctcggcgttgagcccccagcggatgccggcgccttcgatccagcggtgcaacgtgggcaggtcgcgctccttgatggcaaagcgttcgcgcagtgctggaacgtcgagcaagtctagaatttcgctgacggggaagcggctgtcggggagtttcagcaggtgttcgacggcaatcagcagagggtcgcggccgcgttggccttggtcggtcagggtgaacgggatgaagcgtgggtcgttgcgctcaagctggccgaacacggcgcggatatgcggcgcgtagctgtcgacgtcggggaccatgacgatgatgtcccgggggcgcagcgtggggtcggcgctgaagcgttggagcagttggtcgtggaggatttctacttcgcgttgggcgctgtgggcgatgtggaagcggattgaggtatcgcgctccagatccacggcgggccatagctcgcgggtttcattgagtgggcgcagttcgaggatatcgtcctggagttgattgagcagtgttgtcggctcgctgtcgctgaacaggtcgatgcgaccgtcgcggaaagcggcgcggtagctgttggggtcgtcatagctgtccagcaagctgatgtagtcacgaccttgtttgccccacgcggccaataacggatgggcatgctggtgcagggtttgtgggtcgatggtgaccggcatgcccgctttacgcgcctgacgcttgtattcgttacgcagcaggtctttgtcggcgacgatgtcagaccaatggtgtcggcaagggttgtgcacacagagcaggacttggctgaagcgcgcgaggccggcgagggcttccagcgcctgggccggcaacgaggagatgccgaaaacgatgacgcgggatggcaggccctcgggcgctttttccagggtattgatgcgctcgataaagcgttggtgaacgcctgcgcgactttcggccatgccttcttcaccaacatccaatagcagcgcgcgccatagttcggcttgccagcagttggctgggttaaggggtttggattcacctcgaccgttacgcaactggtggcggccggcggcccagtcttccagccagtcggcgcggtagacctggtattggtcgaacaggtcagccaggcgctcggcgagttggtagcgtttacgcaggtcggtgtcgtgggtgaggaagcgctgcaacggttcgaagtgcggctgatcgataagctccgggagcaggcgcatcaggcgccaagtcagtggggctttatcgagcagggatttgggcgggatttcatctttgcccaagaccatgcggtagagctgccacataaagctgccgggcagttgaacatcgattgctgcggcgatgccgcaaccgcccatgtcgtcgtcttccggatcttcagccagggccagcttgagccactgggcgatgccattgctttgtaccagggcgatttcgttttccaagggtgccaaggggtagcggcgcatccaactgaccactaggctgcgaagctcgtccaggcggttgccgtgaaccaccatgaatccagcactaagggacgtcgcatccggcataacggcttccttgggaaaggcaaaatcgagggtgcgactttagcactgtggacagttgttggccgaattgggatgttagctgtcttttcgaccgcccaaaacaaaacccctgactgcgttagcagtcaggggttctggaatttaatcttgacgatgacctactctcacatggggaaaccccacactaccatcggcgatgcatcgtttcactactgagttcgggatgggatcaggtggttccaatgctctatggtcgtcaagaaattcgggtactgagtcgtggcctgggcctcgcttcagcaaattgggtatgtgacagctttcggtgttttgtgaacgtcgaactttcggttcatttcgtcttcacacaccgcaatctgatgctcgttagagtagtcaaattgcttgggtgttatatggtcaagcctcacgggcaattagtattggttagctcaacg

SEQ ID NO: 123 - DNA, 341470 bp, Pseudomonas nodulensis; identical to SEQ ID NO: 54

SEQ ID NO: 124 - DNA, 64291 bp, Pseudomonas nodulensis; identical to SEQ ID NO: 17

SEQ ID NO: 125 - DNA, 755543 bp, Pseudomonas nodulensis
  misc_feature (21059)..(21095): n is a, c, g, or t
  misc_feature (38593)..(38658): n is a, c, g, or t
  misc_feature (122549)..(122561): n is a, c, g, or t
  misc_feature (200493)..(200558): n is a, c, g, or t
  misc_feature (277622)..(277635): n is a, c, g, or t
  misc_feature (308597)..(308670): n is a, c, g, or t
  misc_feature (336788)..(336873): n is a, c, g, or t
  misc_feature (742143)..(742178): n is a, c, g, or t
aagtgctcgatggccgtcaattttccacattcaaggaagcccaaatagcatttgatcgatggcgtgaggtgtacaacttgcagcgccctcatcaagcgttggattacaaggtacctatggaccgataccgtgccagtccctgggcttatccgcagcaactatcggattttgagtatggaccagacgatgtgctggccaaggtttatcacagccgatttcgctttcagaaacgctacttcagcatcgctaaaggcttggttggccatcacatcgcaatacggccgaaccctgaaaagagcgggttctttgatgtctacttctgccatcactttctaagaacgttcgacgtgagcaaacctgactatggttaagaatgtgtccaccatgtccccgcacatgtgtccaccatgtgtccggtccatacaataccacataatggttcaagtccgtgtgggcccaccaaacaagaaagccgcgcattgcgcggcttttgtgtgtctggcaacctcacttcgcaaacaactgcccaatatccttgaacgccttgaactccagcgcgttcccgcacggatcaaacagaaacaacgtcgcctgctcccccacctgccccttgaaccgaatatgcggttccagcacgaagcgggtttgccgggcctgcaagcgttcggccaaggcgtgccaatcttcccagcccagcaccacgccaaagtgcggcacgggcacgttgtggccgtcgacggcgttggtgtgggctgattcctgggaggcggttttcgggtgttcgtgaatgaccaattgatggccgaagaagttgaagtcgacccaatgatcgcttgagcgtccttcttcaaggccaaagacttcaccgtagaaatgccgcgcagcggccaggtcgtataccgggattgccaggtggaaaggggcgagtgtcatcaggtcaaacctctatgggcgttaagtgccccgagtttagccttgctgccaacgatgaaaagacgatagtttttgcatcgagctcaaattatttcgatcaatcgagacgcccatgctgcgtgaactgaagacctttatcgccgtaacccgccacggcacgtttgcggcagcgggcatgcatatcgggctgacgcagtcggcggtgagtgcgcagattcgtcagttggagcaggcgctcggtgtgtcgctgttcgaccgtaccgggcgccaggctacgttgaatgctgcgggattgcgcgccttgccactggcgagagagatcctggagaccttcaaccgcatggcggtgccggtggatgcaaatgagtaccggggtgagttgaaggtgggcgccatcaccactgcacaaaccggtttgttgccccaggcactggtgcgtttgcgtcaggcggcgccgacggtggagtgcaagctgatacctggcgtgtccctggagctgctgagccaggtggacgccggtgagctggactcggcgatcatcatccgcccgcccttcgacctgcccaaggagctgcacgtgcaggtgctgcgcaaggagccgttcgcgctgatcgtgcctcacacgttggcgggtgatgacccgttgcagttgctggcgacgcagccccatgtgcgctatgaccgcgcttcctttggcggtcgcctggtcagccgattcctgaaggaacataaactcgacgtgcgggtagcattggaattggatgagctggaagccatcgtcaagatggtcgaatgcggcctgggcgtatcgctgattcctcaggccgggttgtggctggaacgctcgcccaacgtgcgaatcatcccattgggcagccggaccttttaccgcgaaatcatcctgctgagccgctacagtcaacgccacctgcccgtaccgcaactgttcacccgctgcctgctcgccgacgccaacctgtaagatgccaacacactgcccccccgcatcggagccctcgccttgcccgccctagatgaaatcgaccgccaactgatcgccgccctgcagatcaacgcccgcgaaagcgtggccatgctcgctcggcagttgggtatcgcgcgcaccacggtgacgtcacgcctggcacgcctggagaaaacccaggtgatcaccggttatggcgtgcgcctcgggcagcgggtggtcgatggtggtttgcaggcttatgtgggcattaccgtacaagcgcgctcgggcaaagaagtgttgcgccggttgagtgccatggcccaggtgcagcagttgtgcgcggtgagtggcgagtttgattatgtggcctggctgcgcacggattcgccggagcagttggaccaattgctcgaccagattggcagcgtcgacggcgtggaaaaaaccaccacatcgatcatcctcagtaacaaactggatcgcggccaaccaatctgaccaacagcttcgtcattctgactaaaaacagatcaatccgacgacactttgcgtcttattaacgaacgctacactccctaaactggctgccatcatttcctatactcagcgggtcgtgccccgccgagtcatcagccaggtcagccatgaacacgtccaacaaaagcaatcgccaccctgcagacggtaaaaaacccatcaccatcttcggcccggacttcccgttcgcctttgatgactggatcgaacaccccgccggcctgggcagcatccccgccgcccaccacggcgccgaagtggcgatcgtcggcgccggcatcgcgggtctggtggccgcctacgaactgatgaagctgggcctcaagccggtggtgtacgaagcctcgaaaatgggcggccgcctgcgctctcaggcctttgaaggcgccgaaggtatcatcgccgagttgggcggcatgcgctttccggtgtcgtcgacggcgttctaccactatgtggacaagctcggcctggaaaccaaacctttccccaatccgctgaccccggcctccggcagcacggtcatcgaccttgaaggccagacccactacgcgcaaaagctctccgacttgccggtactgttccaggaagtcgcggacgcctgggccgatgcgctggaagccggttcgcagttcggtgatatccagcaggccatccgcgaccgcgacgtgccgcgcctcaaggagctgtggaacaagctggtgccgctgtgggacgaccgcaccttctacgacttcgtcgccacctccaaggcgttcgccaagctgtcgttcctgcaccgtgaagtcttcggccaggtgggtttcggcaccggcggctgggactcggatttccccaactcgatgctggaaatcttccgcgtggtgatgaccaactgcgacgaccaccaacacctggtggtcggcggcgtggcccaggtgcccatgggcatctggcgccatgtgccgcagcgttgcgcccactggccggccggcaccagcctgagttcactgcatcgcggcgcgccacgcgcgggcgtcaaacgcattgcccacgccgccgatggccgtttcgccgtcaccgacaactatggcgacacccgtgaatacgccgccgtgctgaccacctgccagagctggctgctgaccacccagatcgaatgcgacgaaagcctgttctcgcaaaaaatgtggatggccctggaccgcacgcgctacatgcagtcatcaaaaactttcgtgatggtcgaccgcccgttctggaaagacaaagacccggaaaccggccgcgacctgatgagcatgaccctcaccgaccgcctgacccggggcacctacctgttcgataacggcgacgacaagccgggggtgatctgcctctcgtactcgtggatgagcgacgccctgaaaatgctgccgcagcccatcgacaagcgggtgaagctggccctcgatgcgctgaaaaagatctacccgaaggtcgatatcaaggcgcgcatcattggcgatccaatcaccgtgtcctgggaagccgacccgcacttcctcggggccttcaagggcgcgttgccgggtcactatcgctacaaccagcgcatgtacgcgcacttcatgcagaaggacatgcccgccgaacagcgtgggatttttatcgccggtgacgatgtgtcctggacgccggcctgggtcgaaggcgccgtgcaaacctcactgaacgcggtgtggggcatcatgacccacttcggcggcagcactcacccggagaacccggggccaggtgatgtgttcgatgaaatcgggccgatcgccctggcggattaaggagttgaacatgcgtgtcgccctgtaccaatgcccgccgctgccgctggatgtggccggcaacctcaagcgcctgcatcaactggcgcatgaggcctccgatgccgatgtgctggtgctgccggagatgttcctcagcggctacaacatcggtgccgaagccgttggcgccttggccgaggcgcaagacgggccgtcggcgcaggccattgccgaactggccagaagcgccgggctggcgattctatacggctatcctgagcgggccgcagatggtcagatctacaacgccgtgcagttgatcgacgcccacggccggcgcctgtgcaactaccgcaagacccatctgtttggcgacctggaccattcgatgttcagcgccggtgacgatgatttcccactggtagaactcaacggctggaagctcggtttcctgatctgctatgacctggagttcccggaaaacacccggcgcctggccctggctggcgctgagctgatcctggtgcccactgccaacatggtgccgttcgattttgtcgccgatgtcaccgtgcgggcgcgagcctttgaaaaccagtgttatgtggcctacgccaattactgcgggcatgaaggcgagatccagtactgcgggcagagcagcattgccgcgccgaatggacagcgcattgcccaggccggcctggatgaagccttgatcgtcggtacgctggagcgccaatcgctccttgacgcccgcagcgccaatcactacctgcaagaccgccgccccgagttgtacggcgcgctgcacaagccctgatccagccggtttgttagcataggcacattctatgtttcggaagtgcccatgcctgcgccggccccccctcatcaccttcacctgaccctggccaatggcctgcgggtttccttgcgtcatgccccacggttgaagcgctgcgccgccgtgctgagcgtggcggccggcagccatgatgtgccgttggcgtggccggggctggcgcacttcctggagcatttgctgtttctcgggacagagcgttttcccacggatgacgggttgatggcctacgtgcaacgccatgggggccaggtcaatgccagcacccgtgagcgcaccacggacttcttctttgaactgccggatgccacttttgccgggggcctggagcgcttggccgacatgctgacccatccgcgcctggcgctggaggatcaattgcgtgagcgtgaggtgctgcacgcggaatttatcgcctggtcccaagatgcacaggcgcaacaacaagtcgcactgttggaaggtttggcggtgaatcatccgctacgtggctttcatgcaggcaaccgcgacagcctgccagttgagcgagagacctttcagcaagccttgcaggaatttcacacgcagttctatcagagcgggcagatgaccttgagcctggccggcccacaatcgctggaggcactggaaaccttggcacagcggttcagtgaacagctgacttcagggcttctgcgcccgcaatccgtgcccccggccttgatgccggggcaagcgcagcactatcagcacattgccaatgatcatctgcaccaggtcatcacctgtgatgcgccccgtgaagcgctggagtttctctgcacctggcttaacgcgtcggcacccggcggattgctggccgaactgaaagcgcgacacttggcgagcgcactgcaggcgtcggtgctgtatcacttcgccgggcaagcagtgctggatatcgacattacgctcagtggtcccgctgaatcagccacacaagtcgaggcgttgctgtacgactggctgagctttttcgcacacagcgactgggctgcgttgcgcgaagcgtttgctctgctggccgctcgccaacagcaaacccaagacgccctggcattggcccgaaatgaccgccaggacctgtcggaacaggatgccgtcgcccttgaggccctgcttgaatcgctgcgcttgccaccctccgaacacccatggcaactgccgccgaataaccctttcctgcgcccgccggtgaaggaagaacgcgccggcctgattcgcggccagaccagcgcccaccgaggcttgcgcacgtttgcccaggatcgctcccgagggcgtcgtgatgcatcggcactggccttcagccaggcattggcggacgacagccacgaaggcgcgttgtatctgcaatggcaatcagctccgccacatcaggaaagcgcgttgcagtcgttgcgcgacaatgcccgccaggcgggtgtcgaagtgtcgttcgaaaacctgggcagtcactggctggtgaaaatggtcgggctacaggagccgatcccagcagttctggaagtgctggcgcaacgcctgggcgatccgcaagaggcacaagccgccgcgccgcccatgatcgccatccgcgaattgctcaaggcgctgcccgcttgctgcgccacgaccacgtccgaaacagccgcgtgggacaccgcacgttggcaaggcctggggctgggtttctctaccgcccatgaagccgcgatcaaaaccgctgcggcccgcctgccggggcaacctgcaagcctcaatcatgtcgcgccatccctcagcggccaacgtatttggcatgaagtagaagccgactcaaacgaagccgccctgctgctgttttgtccaacaccacgccaatccttggcggacgaagccgcctggcgactgctcggccatctgctccaggcgccgttctaccagcgcctgcgggtagagctgcaaatcggctacgccgtgttcagcggtatccgacagataaacggccagaccggcctgctgttcggcgtgcaatcgcctagcctgtccctgtcaggcattgccgatcacctgcacaccttcctgaagcaactgccagtactgatcgatagccgcgacgacttgggcaacctggccttggccgagcagttcagcgcacagacactgcccaacgcccaagccgccgaacttctgtggcacgcccatctggcaggccatccgtcggactacctggctcaacttcaaacccagatcagaacctgtacccgcgcagaattgcagcgtgccgccgagcagttgaacgacgccgcaggcggctggcgctgcgtggccaacggaccgcgcatctcgactacgtggcaagcggcagggtgatcattgccgcccctgcaaaaggctttctccctcaagacagcgctaacttgaaaagaattgagtaatattcccacgcacacatctgaacatctccgactggaggtggactatatgtattacttggtagtaaacgtcccatcccttcgtaggagtaagaatatgacctggtccaaacctgcttacactgatctgcgcatcggtttcgaagtcaccatgtacttcgccagccgttaattcgctgggtactacaacgcctcggtttgcccggggcgtttttgttttgagcttgatggagctgccatgtttgtccagattctaggttccgccgccggcggtggtttcccgcagtggaactgcaactgcgtgaactgcgcgggttttcgtgatggcagcctgcgggcccaggcgcgcacccagtcgtccatcgcgatctccgacgatggcgtgaattgggtactgtgcaacgcctcgccggatatccgcgcgcaactccagggctttgcaccgatgcaacccggccgcgccctgcgcgataccggcatcagcgcgatcatcctgatggacagccagatcgaccacaccaccggcctattgagcctgcgcgaaggctgcccgcaccaggtgtggtgcaccgacatggtccatgaagacctcagcaccggtttcccgctgttcaccatgctcacccactggaacggtggcctggcctggaaccgtatcgagctggacgccagcttcaccatcccggcctgccccaacctgcgcttcaccccgctgccgttgcgcagcgcagcgccgccttactcgccacaccgcttcgacccgcacccgggcgacaacattggcctgatcgtcgaagacctgcgcactggcggcaaactgttctacgccccgggcctgggcaaggtcgacgcgccattgctggagatcatggccggcagcgactgcctgctggtggacggcacgatgtgggatgacgatgaaatgcagcgccgtggcgtgggcacccgcaccggccgcgagatgggccacctggcgcaaaacggccccggcggcatgctcgaagtgctggaacagttgcccgagcagcgcaaggtgcttatccacatcaacaacaccaacccgatcctcgatgaagactcccccgagcgagcggaattggtgcggcgcaatgtcgaagtggcttacgacggcatgagcattgaattgtaggagctgacgagatgactgacacgccattgaccaccgccgaattcgaagccgccctgcgagccaagggcgccttctaccacatccaccacccgtatcacgtggcgatgtacgaaggccgcgccacccgcgagcagatccagggctgggtcgccaaccgtttctactaccaggtgaacatcccgctcaaagacgctgcgatcctggccaactgcccggaccgtgagatccgtcgcgagtggatccagcgcctgctcgaccacgatggtgcccccggtgaagacggcggcatcgaagcctggctgcgcctgggacaggcggtaggcctcgaccccgaccaactgcgctcgcaggaattggtactgcccggcgtacgattcgcggtagatgcctacgtcaacttcgcccgccgcgccagttggcaggaggccgccagcagctcgctgaccgagctgttcgcgccgcagatccaccagtcacgcctcgacagttggccgcagcattacccgtggatcgacccggccggctatgaatacttccgcacccgcctgggccaggcccgccgcgatgtggaacacgggctggcgatcaccctgcagcactacaccacccgcgaaggccaggagcgcatgctggagattctccagttcaaactcgacatcctgtggagcatgctcgatgccatgagcatggcctatgaactcaagcgcccgccgtatcacagcgtgaccgagcagcgggtgtggcataaagggatcaccctatgagctttgaccgcagcaagaaaccgacctggcgcccaggctaccgttaccagtacgagccggcgcaaaaaggccacgtgttgctctaccccgaaggcatgatcaagctcaatgacagcgctgcattgatcggtggcttgatcgacggcgagcgcgacgtggcggccatcatcgccgagctggagaaacaatttcctggtgtgcctgagctcggtgaagatatcgagcaattcatggaggtcgcccgtgctgagcactggatcacccttgcctgaaaagccggccaccggcctgccgctgtggttgctggccgagctgacgtaccgctgcccgttgcagtgcccgtactgctccaatccgttggactttgccgagcagggcaaggagctgacgaccgagcagtggttcaaggtgtttcgcgaagcccgcgagatgggggccgcgcagctggggttttccggcggtgagccgctggtgcgccaggacctggccgagttgatcgctgaagcacgcaaactggggttctataccaacctgatcacctccggcatcgggttgaccgagcagaagatcagcgacttcaagaaggccggtctggaccatatccagatcagtttccaggccagcgacgaacaggtgaataacctgctggccggctcgaaaaaagcctttgcgcagaaattggagatggcccgtgcggtgaaggcccacggctacccgatggtgctcaacttcgtgacccatcggcacaacatcgacaagatcgaccgcatcatcgagctgtgcattgcgctggaggcggactttgtcgagctcgccacctgccagttctacggctgggcacagctcaatcgggtgggcttgttgccgactcggcaacaattggtgcgcgccgaacgcatcaccaacgaatatcgcgccaagctggaagcggaaggtcacccgtgcaagctgatcttcgtcactccggactactacgaagaacgcccgaaagcctgcatgaacggctggggcagtatctttctgacggtgacgccagacggcaccgccctgccctgccacggcgcccgacagatgccggtgcaatttcccaatgtgcgcgaccacagcatgcagcacatctggtacgactcgttcggcttcaaccgctttcgtggctacgactggatgcccgaaccgtgccggtcatgcgatgaaaaggaaaaggatttcggcggctgccgatgccaggccttcatgctcacgggggacgcgagcaatgccgacccggtgtgcagcaagtccgagcagcacggcatcatcctgcaagcgcgggaagaagccgaatacgccacccagaccattgagcagttggcctttcgcaacgagcgcaactcacggctcatcgcaaaaggctgacggcctcagcgcttggcgatgatgtacaccgcgtgcacgatgcccgggatgtagccgcacagggtcagcaggatattcagccagaacgcgccgccgaaacccacttgcaggaacacacccagtggcggcaacagaatagcgatgatgatacgaatgaaatccatgggatcagctccagaaaatcggctcgtgtgagccgtgtagctaatcgaccttgggcattcgtgagggttcagtgggatctggcgttgggccatccaggcaaaaaaacgcccccggccaaaagaatcaggccggaggcgctgcgtagaccgcgagacggttcaggaataagggttaaacggcgatacccttgcggcattgcagttgggcggtacgcacgcgggagaaggcgcgggccaggcgcaggagcatttcgtcgatgttgcttttgctcacggtcagggccggggtgaagcgcaggcagttgggttgcggagcttgaaggatcaggccttcgtgcagcgccgcttttacaacagcatccgcagaatcatccgacaacgtcaggccccacatcaggccgtggccacgcagttgaccgtggtcgtagcggtaggccaggcgggcaagaccttcgcccaggtacaagccggtctcacacacgtgatccataaagccgtgctccagcacggagtcgagtactgccagcccggccgacgccatcagcgcgttgccatggtgggtgccttccagctcgcccacttcgaagcaacaggccttgccgcgagccaatagcgctgcaacgggaaccccaccacccaggcctttgccgagggtgatgatgtcggcacgtacgccgtattgctgctcggcgagcaaagtgccgcagcggcccatgccggtttgcacttcgtcgaggatcagcaagatccccagttcacggcacaggcgctcgacgcccttgagatagtgctctgtcgcggggattacacccgcttcgccctggatcggctccagcaggatggcgacagtttgtgcgtcgactgccgcatgcagggccggcagatcgttgaagggcacatggctgaaacccggcaactgtggttcaaaacggttttcaagcgtacttgccgacgccgacatcgccgcaaagctacggccatggcaaccaccgctcgcgctgatgatgcgataggcgccgccgcgatgcagttggccccatttgcgcgccaacttgatcgcggcttcaacggcttccgcgccgctgttaagcaggtaagcctggtcactgccggtgcgatggcacaggcgctcggcgaggttgagttgagcgcggttatgcaagccgttgcctgggttgatcagcgcctgagtctggtcggccagtgccttgatcaacacctgcgggctgtggccgaggctgttggcggcgtttccctggctgaaatccaggtaagccctgtcatcgctgtcccacagccaggaaccctggccgcgcacgaagacttggggtggccgcgctacggagggcatcagggattcgttgggaggattatcgctgggcgtctccagaactaaatcgtccaagctcggcgcggggcgacggaacagattcatgattcacccccaatagtaatcggaccttggtcgctgcgacccgtcattattgccttgaggttttttgccttgcctatgtaaacgctatcaacataaacgctgttcattgcccgatccggccctgtaagccctgcgaataggcgctagactaggcgcctcgggggccagcggccatttcgattttccagctttttcgataagtaagtcttatggatttcaagcaactgcgttatttcgtcgcggtgtatgaggaaggccacgtaggccgtgccgccgagcgtctgtcgatctcccagccggcgctgtcccagcagattcgccagttggagcagaacctggatgtgagcctgttcgaacgcagcagcaagcgcctgctgccgacactggcggcgcatacgctgtacaaccacgccctgccattgatcgatggcatgcagcaggcggttgaggccctgcgcaacttcaagggccaggcgatgcgcacgttggccatcggcgtgctgcaaaccgtgcacaccagcctggtcccgcagatgctcgagcgcgtgcgcaaggcccagccacatttggtggtgcagatctacgaattgactggaattgagattgagcggcggctactcaacggctcgctggatatcggcatcagctacttgccgccacgccagccagggttgcacggcgtgttgttgtacgaagatgagttgaaggtggtcatcccagaagaccatcccttgcgcgaattcaagaaagtctcactgaagcaggccgccgagttgccgatgttgctgctcggggaagaattccaggtccggcagatctggcagggccaactgtccaacctcgggcggcgcccgcaagtgcaggcagagctcaataccatggcgggaattctcgatagcctgcctcataccaagctggcgacggtactgccggggcgctcccaggatgaacacaacagccaggcgctgctgtggaaacccttgagtgaacccagggtgccgctgaaagtcggtttggtatgccgcgatgtgcaacgccagcaggcgacggtggcgttgctgcgcaccttgctggaagacgtgatgaatgccccgcaggcgcctgcctgactttttcgcgggcaaaagaaaaccccgccgaagcggggctttgcagactgtttccctgacatccatttcactccgccgtcctggcagaatcctacgtgtccgtgttgttgctttgcgcttcctgcgcgacgtccatgtgaagtagattatccgtggatccaatatggcgatagaggacgaatagcagtacgtcatgtaagagaatgcttacacgccctccaagcctttagaacagggcttcatccagcaaaaacagtgattcgctaccggcttttaccgacgcactcagcgagtggatgcgcggcaacaggcgcgcaaagtagaagcgtgcagtcccgagcttgctggcgtagaagtcttcttccgactccttgcccaacgcggccttggccatgcgcgcccacatgtaggcatacgccatgtagccaaaggcatgcaggtactccaccgacgccgcgccgatctcattcgggttggtcttggcgcggtccagcacccaggcggtcaactcatccaggttatccaccgccacgcccagcggcttggtgaattcggccagctcggcccccgccgaggcaatgaacgcgcggatctcatcggcaaacagggtgtagaacgccccgccactgccgacgatcttgcgccccatcaggtccagggcctggatgccgttggtgccttcatagatctgggtgatgcgcacatcgcgcaccagctgctcctggccccactcgcgaatataaccgtggccgccaaatacctgttggcccagcacagtggtttccaggcccaggtcgctcaggaatgccttggccaccggcgtcagcaacgccaccaggttatctgcacgctcgcgggctgcggcgtcgtcgctgaacttggcgatgtccagttgcgtcgccacgtaggtggagaacgcccggccaccttcgttggcggctttcatggtcagcagcatgcgccgcacgtccgggtgcacgatgatcgggtcggccattttgtctttggcctgggcgccggtcggtgcacggctttgcaggcggtcgcgggcgtattcgatggcgttctggtaggaacgctcgccggacgccaggccctggatacccacccccagacgctcgtagttcatcatggtaaacatcgccgccaggcctcggttcggctcgcccaccaggtaaccaacggcctcgtcgaagttcattacgcaggtcgccgacgcctggatccccatcttgtgctcaatggagccgcagctcacagcgttacgggcacccaggctgccgtcggtgttcaccatgaacttcggcaccaggaacagcgaaatccccttgggccccgccggcgcgtccggcagcttggccaggaccaagtggatgatgttatcggtgaggtcgtgttcaccgccggtgataaagatcttggtcccgctgactttataggaaccgtccgcctgtggctcggccttggtgcggatcatccccaggtcggtcccggcgtgggcctcggtcaggcacatggaaccggcccactcaccggaatacatcttcggcaagtaagtggccttgagcgcttcgctggcgtgggtgttgatcgacacacaggcgccagacgtcagcatcgggtacaggccaaaggccaggctcgacgagttgatcatctcttcgacctgggccgacacggccttgggcatgcccatgccgccgaacgcaggatcaccaccgacacccacccagccgccttcagcataggttttgtaggcctgtgggaaaccgtccggggtaaacacggcggtgttgtcccaacggcaaccttgttcatcgccaccacggctgagcggggcgatggatttggcggtgaccttgccggcttcttcgaggatggcctctacggtttcggcgtcaacggtgtctgccaatgccggcaactgggcccaagtggtggcgacctcaaagacttcgttgaggacgaagcgcatatcacgcagcggcgctttgtaatcagccatggcaaacctcgtgagaacgtgaaaagtaattcggtaagagtcggttttacaggctcagagtgtacccgaacaacttttcagacacatagggtccacttgtgactgattggtatttttaagtcattaccacgcaaacgcctccgcaggcagactcatcaggcattcgctgcccgcttccacggccgcgcgatgggtagccgtacgcggcagtagacgcttgaagtagaactcgcacgtggccagcttggccttggcaaaatcgccatctggctgttcaagggcagcgatcgccattcgcagccacaggtacgcgagcaccacgtaaccgctgtacatcaagtaatccaccgccgccgcgcccacttcatcggggttcttcatcgcggccatgccgaccttcgtggtcagctcaccccattccccgttcaactgattgagttgcgccacatagcccttgagctgagagtgctcggcattcgcggcacagaacttatgcacgattttggtaaacccacgcagcaacttgccctggctgcccagcaccttgcgccccagcaggtcgagggcctggatgccgttggtgccttcatagatcggcgcaatccgcgcatcgcgcgccagctgctccatgccccattcacggatgtaaccgtggccgccgaagatctgcatgccgtggttggtcacctcaaggccggtatcggtcatgaaggctttgcagatgggcgtgaggaacgccagcaggtcttcggcatcctggcgctggccggcgtcactgctcaggtgcgcggtgtcgagcaattgcgcggtgaaataggtcagtgcgcggttgccttcgttgaaggccttcatggtcagcagcatgcggcgcacatcggggtgcacgatgatcgggtcagcagctttgtctggggccttggcgccggtcagcgcgcgcatttgcaggcggtcgttggcgtatttgatcgcgccctggaaactcgcttcgccattgcacaggccctgcatgccggtgcccaggcgcgcgtggttcatcatggtgaacatgcagttgaggcccttgttcggctcgccgatcaggaagcccctggcgccatcgaagttgagtacacaggtggcggacgccttgatgcccatcttgtgttcgatggaaccacagtgcaccgcattgcgctcgcctgtgtcggcatggaacttgggcacgataaacagcgagatacccttggtgcctgccggcgcatccggcagcttggccagcaccagatggatgatattggcgctcatgtcgtgttcgccggcggagatgaagatcttgctgccggtgaccgcatagctgccgtctgcctggggcacggcacgggtcttgatcaggcccaggtcggtgccgcaatgagcttcggtgaggcacatggtgccggtccattcgcccgctgtgagcttggtcagataggtgtctttttgctcggcggtgccgtgggcgtggatcgccgacatcgcgccgtgggtcagccccgggtacatgccccaggaggtgttgctggagccgatcatctcgctcagcaccaggccgagcgactgcggcaagccctggccaccgtaggccgggtccgccgccacgccgtgccagccgccctccacgtactgggcgaaggcttccttgaagcccttgggcgtggtgaccacgccattgtcgaaatgacagccttcttcgtcgccgctgcggttgagcggcgcgagtacgttctcgcagaatttcgcgccctcttcgaggatcgcgccgaccatgtccgggctggcgtcggtggcacccaacgcggcgtagtgaccgtggaaatcaaacacgttgtcgatcagaaagcgcatgtcgcgaaggggagctttgtactcaggcatggcaatgtctccgtcagcagatggtttcaacctactgccggccaacgcctgggacaatcactgtagaaccgctgaatacaccgccatcactcaaccggcagcgctctgcatgcgcaccgcgccacgccgggtctgcccggacgccaccacgcagttacgcccggcgcccttggcggcgtacagcgcctggtcggcggacttgagcacttcctcgggggagcgctgctcggcctggcgttcggccacgccgatactgatggtcaccgagacactggaggcgccgctgcccgaacggcgctggcgaccctgttgatcgtcctgggggcggtccgaattacgcagcttgatgtcgtagtcggcgatgatctcgcggatctcctccaggtgcggcatgcattcatccagggtcttgccggcgaacaccacggcgaattcttcaccgccgtagcgataggcgcgcccgccgccgttgaccttggacagcttgctcgccaccagccgcaatacctggtcgcccacgtcatgaccatgggtgtcgttgaaacgcttgaagtggtcgacgtcgctcatcgccaacacatagttgcgccccagccgctgcatgcgctcgttcagcgcacgacgccccggcaagccggtcagctcatcgcgaaaggccatttgataagcctcgtgggccacaccggcggcgatcatcagcatcacctggctgcacatgatattcagggtgaagggcaggatgaacgtctgcggcaacatccagaacaggcccagcaaccccaccagttgcgccgcatgcagcgggcgcggctggtaccagtattgcgccgccagggtcaggaagccgatcaggaacatcgggtacgacagctggatcaggctcatccagctgccatgcagcgccggccagcggatctccgccagccagttcagcaccgcctggggataactctgctccagcgccagggccacgctgcccaccgccagcaacaccgcgccacgggctacaaagtcacgaaacaggtgggtcttctcctgccacagcgcgtagatgctgaacaacaacggcagcagcaggcagcacaggtggaacaccacggcggcgtcttcgcgcacgcggccattgtcgcggtagaagtcggtctgggtatcgagcaggaagtaggcgatgtataccgtgatcatcaggaacagttcacgctggcggcggtacaccgcgcagtacgaaccaccgagcaacagcaccagggtcggcaacacattgaacagtgaggtgaagaaaacgttgaggtccttgacgtacgcagccgagagcccggccagcaagagcagcaacgaaggtagaaaatgactgaaacgtacagcggacacgcgtgacaagggtaaaactccgacccgcaaaaaatgatggcactgtgcctctatgtggacagttaagcacaacctgacacacatgcatcacattgccatcactgtaacggcagccggcggtaatccctgagtgctgcggtgtggttttttatcgcccacaaaaaagccgccgcccccgtagaggagcggcggctctggaagtgaacccggtaaggcttagtaagccaggccgaagtcttcttctttcatgtccatcaggttgttggcacccgacagcatggtggctttgtgggccagggtacgcggcaggatgcgctggaagtagaagcgcgcggtctgcagcttggcggtgtagaacgcttcttcggtggtgccggcagccagtttctcggccgccaggcgcgccatgtcggcccagaagtaagccaggcaggcgtaaccggagtacatcaggtagtccaccgaggcggcacccacttcttcgcggtctttcatcgcggccatgccgaccttcatagtcaactcgccccactctttgttcagcgcagccagcggtgcaacgaactctttgaccgcttcgttgccttcgttggcctggcagaacttgtgcacgatcttggtgaagcccttgagcgcttcgccttgggtcatcagcactttacggcccagcaggtcgagggcctggatgccggtcgtgccttcgtacagcatcgaaatgcggctgtcgcgaacgttctgctccatgccccactcggcgatgaagccgtggccgccatagatctgcacgccgtggttggccgattcaaagccgacttcggtcatgaacgccttggcgatcggggtcatgaaggccagcaggccatcggcctgtttcttggcgtcttcgtcggtgccgtatttgacgatgtccacttgcttggcggtgaagtacaccatcgcacggttgccttcggcaaaggccttcatggtcagcagcatgcggcgcacgtcggggtgcacgatgatcgggtcggcggctttgtccggggctttcgggccggtcagggagcgcatttgcaggcgatcgcgggcatatttcaggccaccctggaagccgatttcggcgtgggacaggccttgcagcgcggtacccaggcgagcggtgttcataaaggtgaacatgcagttcaggcctttgttcgccgggccgatcaggaaaccggtggccgcgtcgaagttcatcacgcaggtggcgttgccgtggatgcccatcttgtgttccagggaaccacagctcacggcgttgcgcgcgccaatcgagccatcggcgttcggcaggaacttcggcacgatgaacagcgagatgcctttggtgccggccggtgcgtccggcaggcgggccagtacgatatggacgatgttgtcggccatgtcgtgttcaccggccgagatgaagatcttggtgccggagaccttataggaaccatccgcctgaggctcggccttggtgcgcagcatgcccaggtcggtgccgcagtgtggctcggtcaggcacatagtgccggtccattcgcccgacaccagtttggtcaggtaggcctcttgctgctcgggcgtgccgtgctcggagatagtgttcatcgcaccgtgggacaggcctgggtacatgccccacgaccagttggcggcgccgaccatttcgctcacggccaggcccagggattccggcaggccctggccgccgtgctccacgtcgtgggccaggcttggccagccgccttctacgaattgtttgtaggcttctttgaaaccggtaggggttttaacgcccgactcactccaggtgcagccttcgatgtcgcccacgcggttcagcggtgccagcacttgctcacaaaacttggcgccttcttcaaggatggcgtcaaccatgtccggggtagcgtcctggcaagccggcaggctctgatagtgcgcttcatagccaagcagttcgtcacgaacgaagcgaatatcacgcaagggggccttgtagtcaggcatagcgataaacctctgctgatgtatctggaatgaacaaccgcgtggaagtgttggggcggtcaaacaggtgtttgaaacatacgtttacgacctggggatgtcaagcgtcgtccggatgccgtttgtcatgacgcgggtcaatggcgcgcacggtaacgcttgcggctagacgccacatgactgggggagtgtagaagttcagaaggacgacacagtaaaaatgtgggagggggcttgcccccgatagnnnnnnnnnnnnnnnnnnnnnnnnnnnnnnnnnnnnnctatcgggggcaagccccctcccacattttttagcgccagcagatcaggcgtaggtgtcgatcagggtaccgagcatttcatcggaagccttggcgactttagcgccgagttccacttggaacttgccttgggccatttcaaccatgttgctggccgagttggacggctgggcgcggtcgttggcttgcagacggtcgctttgcgcgtccgatggctgagtggtcgcggcgctggcaattctgccggcggcctgatcgacacggttctgcccggactgaatgctgctcaggcccgagtaaaacgcgctgcttccagagatttccatggcgtaagcctgcctttagagaatcgtgaagttgaattgaagcagatatcccgtcaaagggctcgtcaaaaacactaatggcataatgccttgtcgatagccaaaatcagtcaagcaggtccagttgcaagtactcggcaaccgcttcagccccggcgtgcttgagtttcggcacacgccccaagaatggcgcaggcaggcgctcagccagggtggcaaggttttcttccagacgggaggtcttggggtcgatgatattcgccacccacccggccaacggcaggccatcccgggcgatggcttcggcggtcagcaaggcatggctgatgcaacccaggcgcacccccaccaccaggatcaccggcaatttcagcgccatggccaggtccgacatattcgcctggtcagccaatggcacgcgccagccaccggcgccttcgatcagggtgaaatccgcttgccgtgccaggatctgctgcatgggcttcaacaacgattgcacggtgagcgagaaacccgcctcccgcgccgccagatggggtgcgatggccggttcgaacgccaccggattgacctcggcataactcaacggcagcgagcattcggacagcaacgccaacgcatcggcgttgcgcaagcccttgggcgtgacctggcaaccggaggccaccggcttacccgccgcggtgcttctgccggcttgccgcgccgcgtgcaacagaccggcggcgatggtggttttgccgacatcggtgtcggtgccggtgatgaagtaggcggcgctcatagaggtttctccagtacggcatacaccacttggtaagtcgccggcaggccttgggcctggcggaaccgctcatacgcgtgcaccagtgcaacaatccgcgcgcgccccgtcaacccaccggggcgaccggggttgaggttatgcgcgcccagggccttcaattcgtgggtcaggctgcgcacatccgggtaatgcaacacatgaggacggcgctccaggctcaccacccgcaggccgctggccgcacacacttgttgatacgcctcgaaggtgcggaagcgattgacatgcaccaggccatccgccgcacgccagctctcgcgcagctcttccagggtgcccgtgcagagactggcgaaggccagcacaccgcccggttgcaacacccgatgggcctcgctgagtaccgcctcgaaattcgcacaccactgcaccgcgagggacgagaagatcagctgcacgctgtcagctttgagcggcaagcgttcggcgtcgccggcgatgaagtgctcggcgccacccagggggcgtgcgtggttgagcatgccttcggcgatgtccaacgcgatgccttggctggcgggccagcgctcccccagcacacggctgaaataaccggtgccgcagcccatgtccaaccaacgttgcggcgcggtatcggccggtaagcgcgccagcaattggcagcccaccgcccgctgcaactcggcgacgctgtcgtaactggcggcggcacgggaaaaggacgccgccacctggcgcttgtccggcaacgcacccggcagcggggcgtgggataaatcagtcatcgacgcactcatgcaaaaaagcctggatggcccccgctacaccgtgagggtcttccagaagaaaagcgtggccggcctgttcaatcaggccgatttcaacatccggcagcagggccagcaggtcgctggcggcttcggcgggcaccaacccatccaggccggcgaacaggtgcaactgcgggccgcgataggccaataaggcttcacgggtatccaactgggcgagtagctcaaggccgggcatcaacacactgggcggcgtgttcggcgcgctactgaccagcaggcgcgacagcccgcgcgggtcttcggcacccttggcgcacaacaaaccgaagcgtttgagggtgacttgggagtcggcatggcagccggcgaggaatgcatcgaaggtctcggcgggcatcgcgcttggccagccagcgtgggcgacgaaacacgggttactcgccagcgtcagcaggccgcagcaacgttcgccgcgccgcgccgccagttccgaggccagcatgccgcccagggaccagccgcccagccaggcgttgtccggcagcgtagcgtcgagttcgtcgagccactcgttcaggtcgctggagtccagtgcaggcaacggttcgatctgcacctgcaggtgctcgtccaaaccttgcaaggcggcggccaacggctccagcggcgatacaccgaggccccagccgggcagtaatatcagtcgatcacgcatggcctcgctccgaactgcctaacaagcggaaacacgcttccaatgcgtttaacaatagctgcacctgcgccgcgctgtgggctgccgtcaatgtcacgcgcagacgcgcgctgccggcgggcacggtgggtgggcggatcgccgtcaccatcaggccgcgttcacgcagcatctgcgacaggcgcacggccttggcgctgtcgccgatcaggatgggttggatcggcgtaaagctgtccatcagctccagcccaatctgctcggcgccctggcggaactggcggatcaggcggttgaggtgctcgcgccgccaatgttcgctgcgcaacagttccaggcttttcaaggtggcacaggccagggcgggcggttggctggtggtgtagatgtacgggcgggcgaactggatcaggctttcgatcagctcttcactgccggccacaaatgccccggccgtgccgaacgccttgccgagggtgccgaccagcaccggcacgtcctcctggctcaggccgaaatgctcgacgatcccgccgccgttggcgcccagggggccaaagccatgggcgtcatctaccatcaaccaggcgcctttggccttggtttcgcgggccagcgcgggcaggtcggccaggtcgccgtccatgctgaatacaccatcggtgaccactagggtattgccggtagctttctccaggcgcttggccaggctctgcacatcgttatgcaggtaacgattgaaacgcgcacccgagagcaagcccgcatccagcagcgacgcatggttgagacggtcttccagcaccgtatcgccctgccccaccaatgccgtgaccgcgccgaggttggccatgtagccggtggtaaacagcagcgcacgcgggcgaccggtgaggtcggccagggcttcttccagttcatggtgtggcgtggcatgcccgaccaccaggtgcgaagcgccgccgcccacaccccaacgcgaggcaccggcgcgccaggcctcgatcacctgcgggtgattggccaggcccaggtaatcgttattgcagaacgccagcagcggctggccgtccaccaccacttccgggccctgggggctgtcgagtagcgggcgttggcgataaaggtgttcggcacggcgggcagcgagacgcgcggcgagatcgaaagacatgcaggcctcgattaaacagatgtaggcggtcaagaatgtggcggggatccagtgtgggagggggcttgcccccgattgcaatctgtcagttgatgcaggtgtcgactgacccatcgctatcgggggcaagccccctcccacaccagccgtttcccacaggtggctggcatttcaatcaaacaacggcgttatagaactgctcgctgctcttctgctccaccaacgcctgctcgattgcggcctggtgcacttcatcggcatgttcttcacgggcttccggcaggatgcccaggcgcgcaaacagttgcatgtccttgtcagcctgcgggttggcggtggtcagcaacttgtcgccgtagaagatcgagttggcaccggcaaagaacgccaacgcctgcatctgctcgttcatcgcttcacggccggccgacaggcgcacatgggacttcggcatcaggatgcgcgccacggcgagcatgcggatgaagtcgaacgggtcgatgtcttcggcgttttccagcggcgtacccgccactttcaccagcatgttgatcggcaccgactccggatgctccggcaggttggccagttggatcagcaaattggcgcggtcgtcgagggactcgcccatgccgaggatgccgccggagcagatcttcatccccgaatcacgtacataggccagggtttgcaggcgctcgctgtaggtgcgggtggtgatgatgctgccgtagaactccggcgaggtgtcgaggttgtggttgtaatagtccaggccggcctgggccagggcttcggtctggtcctggtcgaggcggccgagggtcatgcaggtttccaggcccatggcctttacgcctttgaccatctgcaacacgtagggcatgtctttggccgacgggtgtttccaggcggcacccatgcagaagcgcgtcgagccgatggctttggcgcgggcagcctcttcgaggaccttctgcacttccatcagcttctctttttccaggccggtgttgtagtggcccgactgcggacaatatttgcaatcttccgggcaggcgccggtcttgatcgagagcagcgtcgacacttgcacacggttggcgtcgaaatgcgcgcggtgcacggtctgcgcctggaacagcaggtcattgaacggctgcacgaacagcgctttgacttcggcgagggaccaatcgtgacgcaaggtggcggtggtgctggcgctcatgggcgattccttgattatgctttggcaagcgctgcgggaagggcaatacccacaggcacgacacggatgctcggcatatttaaggaagattcatgcactgtcaaccgagacacaaacaccaggtttacatctggttaaataacatacaaacctgtttaatctgtgatgaagcgacacaatccgcccattgtgtgtgcaacgtctgcgaaaccgagctgccctggctcatggagcactgcgatgtgtgtgccctgcccctgccgatggagggtttgacttgcgggcaatgccaaaaaaatccccctgcgtttaaacaggtcatcgccccctggtcctacagctttcccatcgacagcctgatcagccgcttcaagcatcaggcacgctggcccctcgggcagatgctggcgtggctgttggcgcaacacctgcaacatcgcttcgataacaccggactcccccgccccgactgcctgctaccggtgcccatggcccgcaagcgcctgcgcgaacgcggctacaaccaggcgttaatgttggcacgctggctcagcagcgacttgaacattccccacgatgaacagctgttgttacgcccccatgaaaccgtggcccagcaggcactcgacgccaggacccgtaaacgcaacctgctcggtgccttcgccctggcgccccacgcccaggtgcagggccgccacttcgccctggtcgacgacgtgctgacgaccggcgccacggcccatagcctggcgcggttattgatgaacgccggtgcgaagcaggtcgatgtgtattgcctggcccgcacacccaaaccgggcagttgacttgactccagcccaccttgcccgcaacgttcggctcatcccagccaagcgtatccacatgtctctgccaacctccctcagccaacacatcatccgccgcccccagcgcattgccttactggcacatatcgccgagcagggttccatcacccgtgcggccaaaagcgcaggcttgagttacaaggcggcgtgggatgccatcgacgagctgaacaacctggcacaaaagccgttggtggaacgcagcgtgggcggcaagggcggtggtggcgcgaagctgacggccgaaggtgagcgcgtgctgcgtctttaccagcgcctgcaagtgctgcaagccgaagtgctgggttccgatgaagccgccagcgacttcaacctgctcggccgcttgatgctgcgcaccagcgcgcgcaaccagctgcatggccaggtgatcgccatcgagcagcagggccgtaacgacctgatccgcctgcaactggccggtggcctgagcctggacgcgcagatcacccatgacagcacgcaacgcctggaactggaaaccggcgtggaagtggtggcgctgatcaaggccggctggctggaagtgctcgcatccgagcaagctgcaacacctggacacaattgcatgagcggcaccgtcgacgtcattctcgacgccgacgacggccccagcgaagtgcgcattgccctgcccaatggccaggttttatgcgccctggcgcggcccgaggcactcaaggacgtgggcgccgccgaaggtaaaaccatcaccgtgcaattcgcgccaagcaatgtgctgctcggtacgccggtgtaggcgcagcccgccttcaaactgcaacaatttcgtcacgcccgctccttatggtgtctgcaaaaaccgcagggagcctgagatgagcctattagaagaaaaccaagccaccgacctggaacagatggtcggcctcacccgccgccgctttatcggcgccggtgcgctgtgcggtgccgcgatgttcctcggcggcaacctgctgagccgcagcgccctggccgtcaacgccgccagcgccagcccactgctgggctttaccagcatcgccgccgccaccagtgacgccatcaccttgccgccaggctacagcgcctcggtgctgatcagttggggccaaccgctgagcaagaacgcacccgccttcgacccgtccggcaacggcacggccaaggcccaggagcagcagttcggtgacaacaacgacggcatgagcctgttcgccttcccgggcgacgacaaccgtgcgctgatggcgatcaacaacgaatacaccaattaccgctacctcttcgcccacggcggcgcgccgcaatcggccgaagacgtgcgcaaggcccaggccagcgaaggcgtgtcggtgatcgaagtgcggcgcaagggcgacacctggcagttcgtgcaggactcgcgctacaaccggcgcatccacggcaactcgccgatcaatctcagcggccccgccgccggccacgcctggctgaaaaccagcgccgacaaaaccggcaagaaggccctcggcactttccagaactgcgccaacggcaagacaccgtggggcacctatctgacgtgcgaagagaacttcaccgactgttttggcagcagcaacccacaacaaaccttcgacgccgggcagaaacgctacggggtggtagccgccagcaaagacatcaactggcacccgcacgacccgcgcttcgacatcgccaagaaccccaacgagctcaaccgccacggttgggtggtggaaatcgacccgttcgaccccaagtccacccccgtcaaacgcaccgccctgggccgcttcaagcatgaaaacgccgccctggctgaaacccgtgacggccgcgctgtggtgtacatgggcgacgacgaacgcggcgagttcatctacaagttcgtcagccgcgacccgatcaaccaccacaaccccaaggccaacaaggacctgctcgaccacggcactttgtacgtggcgatcttcgatgcgggcgacagcaacgccgatcaccccaagggcaagggccaatgggtcgagctcagccacggcaagaacggcatcgacgccagcagcggcttcgccagccaggccgaagtgctgatccacgcgcgcctggccgccagtgtggtgaaagccacgcgcatggaccgcccggaatggatcgtggtcagccccaccgatggccaggtctattgcaccctcaccaacaatgccaagcgcggtgaagacggccagccggtgggcggccccaacccgcgtgagaaaaacgtctacggccagatcctgcgctggaaggccgacgcggataaccacggttccacggaattcagctgggacctgtttgtggtggccggcaacccgggcgtgcacgctggcacgccaaagggtggctcgtcgaacatcaacccgcagaacatgttcaacagccccgatggattgggtttcgacaaggccgggcgcttgtggattctcaccgatggcgactacagcaacgcgggtgacttcgcgggcatgggcaataaccagatgctctgcgccgacccgtccaccggggaaattcgccgtttcatggttgggccggtggcctgtgaggtgacaggcatcagcttctcgccggatcagaagacgttgtttgtggggatccaacacccaggcgaaaccggcggatcgacctggccggagcatctgccgaatggcaagccgcggtcgtcggtgatggcgattcggcgggatgacggcggtatcgtcggcgcctgacaaagcctcatcgggggcaagccccctcccacattgattgcattcacatattttgacttgtgaacacagtcagtgtgggagggggcttgcccccgatagcaatggcacagtcaccacctatctcagccccggtgcgttaccatacccggccggacgcggcgccctgctgcgcgcaggagttcgcatggcccacccgtttgaaacactcacccccgacctggtcctcgacgctgtcgaaagcatcggtttcctcagcgatgcgcgcgtattggcgctcaacagctacgaaaaccgcgtctaccaagtgggcatcgaagactccgagccgctgatcgccaagttctatcgcccgcagcgctggaccaacgaggcgatccttgaagaacaccgcttcaccttcgaactggccgaatgcgaagtgccggtggtggcaccgctgatccacaacggcgaaagcctgttcgaacatgccggcttccgcttcaccctgttcccgcgccgtggcggccgtgcgccggaaccgggcaacctcgaccaactctatcgcctcgggcaactgctcggccgtttgcatgcggtgggctcgacccgcccgttcgaacaccgtgaagccctgggcgtgaagaacttcggacacgactccctcaccaccttgctggaaggcaatttcatccccaaaagcctgctgccggcctacgagtccgtggcccgcgacctgctcaagcgcgtggaagaggtgtacaaggccacgccgcacaagaacatccgcatgcacggcgattgccaccccggcaacatgatgtgccgcgacgagatgttccacatcgtcgacctggatgactgccgcatgggcccggcggttcaggacctgtggatgatgctcgccggcgaccgtcaggaatgcctggggcaactgtcggagttgatggacggctatcaggagttccacgacttcgacccgcgtgaactggcgctgatcgaacccctgcgcgccttgcgcctgatgcattacagcgcctggctggcacggcgctgggatgacccggcgttcccccatagtttcccgtggtttggcagtgagcggtattggggcgatcaggtgttggccttgcgcgaacagctctcggcgttgaatgaagagccactgaagctgttttgactgacaaatatccttacaatcgcgctttgttagctgcctaagcaaggatttcgcaatgcaagccgccaacccccgcaaggggtacatcctgggcctgagcgcctatgtcatctggggtctgttcccgctctacttcaaagccatcgccagcgtgcccgccgccgaaatcatcgtgcaccgcgtgctgtggtcggcgctgttcggcggtttgctgttgatggtctggaaacatcccggctggttccgcgaattgcgtgacaaccccaagcgcctggcgatcctggcccttagcggctcgttgatcgcgggtaactggctgacctacgtgtggtcggtgaacaccgggcgcatgctggaagcgagcctgggttactacatcaacccgttggtgaatgtggtgctgggcatgttgatcctgggtgaacgcctgcgccgtttgcagtgggtcgccgtcgggctggctgcggtgggtgtggcgcagcaggtgtggcaggtgggcagcttgccgtgggtgtcgctggtactggcgttgacctttggtttctacgggctgatccgcaagcaggcaccggtgaaggcgctgccagggctggtggtggaaacttggatgctggtgccgattgcggttgcatggctgctgttcaatccgaccgcccacagtgcgcagatggaattctggggcacctccgaagcctggtggctggtagccgccggcccggtgacactgatcccgctggtgtgtttcaacgccgccgcacggcatttgccctataccgccctgggctttttgcagtacgtcgcgccgaccctggtattgctggaagccgtgctgctgttcggcgagcatctggcaccaagcaccttgaccgccttcgcgttcatctgggcgggcctggtggtgtacagcgtggatatctggctcagcgcacgcaaacgttgatcaaataacgtacaaacctctgcaagccataatctacgtggcttgcagacatccaccccaaggttatccacaacctgatccccgccatttgtgcacaagcccttgaaactgctcgttttttgctcaagtagcgaagaaccccgcacggcgtggcctggcgccgggtctctacaggttatccacaggcccatgcaagatttccatgcataaccctgtgggcagattattcctcgtggtgcagctccaccatcagatcatcggccagggtttccagggacaattgcaaagtatccagggataacgctgccggcacctgcaacagcgcttcagcggtgaacagcgggtcaccgctcatgggcgccgggcgcacgtccgtgctcaggctctccaggttcacgccctgcttgctcagcagcgccgtgatctcgcgcacaatgcccgcacggtcattgcccaccagcgtcatcatgatcgacttggaggccgaggcctgcccgctgctgccctcacccaccagcacgcgaatgccgtgtgtggataagtcctccagcgcaccgaccagcgcctgacggttctccgtaggaacgccgacgcgcaggatcccggcaaattgcccggccatgtgcgccatgcggctttccagccagttgccaccgtgggcggcgatgttctgtgcgatgcgctcgaccagaccgggtttgtcggcggcgataattgtgagtacaagatggtccatggcaaagccctctgaattcaatctacaaggtggactcggaagccctcgaaaacaaatcgtgtaccatttttatatttatctggaacaatccaatagttttttgagaacatctggttctccgctgtgaccgtacgaccaaagtgggtcgctaaacgacgtatttagtctaattttcacaaccgcaagtcatcatgtagtatgcccaaccgtgcactacataatgaaaatctgaaaaagcgcataagctccgcagagtgaggcaagcaatgactgaacacgttcaagtcggtggcctgcaggtcgccaaagtcctgttcgacttcgtgaacaacgaagccattcccggtaccggcatcactgccgaccagttctgggccggtgccgacaaggtcatccacgacctggcaccgaagaacaaagccctactcgccaaacgcgacgatttccaagcgcggatcgatacctggcaccagactcacgcaggccaggcgcacgacccggtggcttacaaagccttcctgcaagacattggatacctgctgccagaagccgcggatttccaggccacgacccaaaacgtcgatgacgagatcgcccgcatggccggcccgcagctggtggtgccggtgatgaacgcgcgcttcgccctcaacgcctcgaatgcgcgttggggctcgctgtatgacgcgctgtatggcaccgacgccatcagcgaagccgacggcgccgagaagggccagggctacaacaaggtccgtggcgacaaggtgatcgccttcgcccgcgccttcctcgatgaggccgccccgcttagcgctggcagccatgtggagtcgaccggctacaagatcgttgatggcacgctgatcgtcagcctcaagggcggcagcaacagcggcctgcgcgacgatgcccagttgatcggctaccagggccctgcggccgagccgattgcgatcctgctgaaacacaacggcctgcacttcgaaatccagatcgacgccagcaccccggtcggccagaccgacgccgccggcgtcaaagacgtgctggtggaagccgcgctgaccaccatcatggactgcgaagactccgtcgctgccgtggatgccgacgacaaagtggtgatctaccgcaattggctcggcctgatgaagggcgacctggccgaagaagtggccaagggcggcaagaccttcacccgcaccatgaacgccgaccgcgtgtacaccggcgtaaatggccaggatgtgacgctgcatggccgttcgctgctgttcgtgcgcaacgtgggtcatctgatgaccatcgacgcgatcctcgacaaagacggcaacgaagtgcccgaaggcattctcgacgggctgatcaccagcctggccgcgatccacagcctcaacggcaacagcagccgcaagaacagccgcaccggttccgtgtacatcgtgaaaccgaagatgcacggcccggaagaagccgcgttcaccaacgagctgttcggtcgcatcgaagacgtgctgaagctgccgcgcaataccctgaaagtcgggatcatggacgaggaacgccgcaccacggtcaacctcaaggcctgcatcaaggccgccagcgagcgcgtggtgtttatcaacaccggtttcctcgaccgtaccggcgacgagatccacacctccatggaagccggcgcgatggtgcgcaaggcggcaatgaaggcggaaaaatggatcggcgcgtatgaaaactggaacgtcgatatcggcttgagcaccggcctgcaaggccgtgcgcagatcggtaaaggcatgtgggcgatgcccgacctgatggcggcgatgctcgaacagaaaatcgcccatccactggccggcgccaacaccgcgtgggtaccgtcgcctacggcggctgcgctgcacgtgttgcactaccacaaggtcgacgtattcgcccgccaggccgaattggccaagcgcgaacgcgcgtcggtggacgacatcctgaccattcccctggccagcaacactgattggtctgacgaagagatccgcaacgagctggacaacaacgcccaaggcatcctgggctatgtggtgcgctggatcgaccagggcgtcggctgttcgaaagtgccggacatcaacgatgtgggcctgatggaagaccgcgccaccctgcgtatctccagccagcacatcgccaactggctgcgccacggcatcgtcaacgaagcccaggtgatggaaagcctcaagcgcatggcgccggtggtagaccgtcagaatgccggggacaaactgtatcgcccactggcaccggacttcgacagcaacatcgcgttccaggcagcggtggagttggtgattgaagggaccaagcagccaaacgggtacaccgagccggtgctgcaccgtcggcgtcgggagttcaaggctaaaaacggcctgtaaatgaaaaagccctgatcgagagatcggggctttttctttggggttgtggtggctgaactggcgctatcgggggcaagccccctcccacaactgataggcggcgcagcacacaagtgggagggggcttgcccccgatgaggccgttatagacaccgcagaatcaggacgccatccccaactcgcgcttgaccatcttcgccaacttcacgctatcaatcggcttgagcaagaagtccaccacgctcaaatgcatcgcatcgatcacgtccggcgcttcggcgtcccccgacatgatgatgatcggcagcgctgcccgggtggattcacgcacttgtcggatcagttccaggccattgctgggcgccatgcgcaggtcggtgatcagcaaaccgatggagctgctggacttcaacaaatcccacgccgcctcaccactgtcggcggtcatgcagcgaatgccgtccagccccaggatttccgccagcagttcacgcgcgtccttgtcatcgtcaacaatcaacacgcgttgtggcggtaaatcaggctccagcatcacggcgctcagcgcctcgcgctcggcatcgctcaaaatatcgtggtcggacatacggttctcagcaattctcatctagctcccagcacactcgtcagacatctgcggaagggcgatcaatgtgcacttcgtcggaaagtttgactagtgggtgttctacggggtttggacgatagtcatgtaaggtttttccctagttctatggtgttttcagcgacctagacttacgtccaatgggcacccgctgcgcaggagtcgaccatgagggacgataacgacaaaaaaactgcggtcactgttatgagtaaagctgatgcctacgcccaggcggggaaaactgctgtactgcaaaatatccacggcaccctgcaattcctgcaacgtttcccgccgttcaaccagatggaaaacgcccacctggcgtttttggtggaacagtgccagttacgcttctacagccccggcgacagcatcctcaaaccgtcgggcggcccggtagagcatttttatatcgtcaagcagggccgcgtcgtgggcgagcggccggacagcgccgaaaccacctttgaaatcacgacgggcgaatgcttccccctggcagccctgctcggtgaacgggccacccgcaccgagcacaaggccgccgaagacaccttctgcctgcaactgaacaaaccggcgtttatcaagctgttcgcgctgtccagcccgtttcgcgactttgccctgcgcggcgtcagcagcctgttggaccaggtcaaccagcaagtgcagcaaaaggcggtggaaacccttggcactcaatactccctgaacactcgcctgggtgaattggccatgcgccacccggtaacgtgcagcccaaccacgccgctgcgcgaggccgtcacgctgatgcatgagcagcaggtgggcagcatcgtgatcgtcgatgaacacaaagcgcccctggggattttcaccctgcgtgacctgcgccaggtagtggccgatggcaccagcgatttcagccgggccattgaaggccatatgacccaggcgccgttcttcctgaccccggaccacagcgccttcgacgccgctatcgccatgaccgaacggcatatcgcccatgtgtgtctggtcaaggagcagcgcctgtgcggcgtggtgtccgagcgcgacctgttttccctgcaacgcgtggacctggtgcacctggcgcgcaccatccgcaacgcaccgcgggtagacaacctggtggcgattcgcggtgaaatcggtcaattggtggagcgcatgctggcccatggcgcgtcgtccacccagatcacccacattattaccctgctcaacgaccacaccgtgtgccgggtgatcgaactgaccctggccgaaaaaggcgaccccggtgtgccgttcagctggctgtgcttcggcagcgaaggccgccgcgaacagacgctgtacaccgaccaggacaacggcatcctgttcgatgccaaggacgccgccgaagcggccgagatacgtggtcggctgctgccactggcgcagcaaatcaatcagagcctggcgctctgtgggttcagcctgtgcaagggcaatatcatggccggcaacccggagttgtgcctgtcgcgagccgaatgggcgcggcgttttgcagcgtttatccgcgaggccacgccggagaatctgctgggttccagcatctatttcgacctgcgtgtggtgtggggcgatgaacgtggctgcgagcaactgcgccagggcattctggatcaggtcgcggacaaccggttgttccaacgcatgctggccgagaacgcattgcgccagcgcccgcctgtaggacgtttccgcgagtttgtgctgacccgtaaagggggcgagaaagccaccctcgacctcaaggtgcagggccttacgccgtttgtggacggcgcgcgcctactggccctggccaatggcatccacgccaacaacaccctggagcgcctgcgccaactggtggtcaaggaagtaatcgagcgcctggacggcgccgcctatgaagaggcctaccactttatccagcaaacccgcatgcagcagcaccagttgcagacccgcgagaaccagccgtattccaaccgtgtcgaccccgacagcctcaaccatctggaccggcgcatcctgcgggaatccctgcgccaggcccaacgcctgcaaagcagcctgacgttgcggtatcagctgtgagcttgttcaactggctgcgtacgaaaaagccggggctcgacagctcgcagcaacagcgcctggagcaactgtgcaagccttcgccgctaggcaaccaacctttgcccagccagcgctgggtcgtggtggacctggaaaccagcggcctgaacctcaatcgcgaccaggtgctgtccatcggcgcggtggtgatcgaggacggtgcggtggatttctcccagatgttcgaacgcaccctgcaacgcgccgagaccagactcagccccagcgtgctgatccacggcctcggccccagtgccattgccgccggcagcgacccggtggaggcgctgttggacttcatgggatttgtcggcgacagcccgttgctggcgttccatgcgccgttcgatcaacacatgctgtgccgggcgctcaaggacagcctgggttaccgcctggcccacccgttcctggacgtggccgacatcgcccctttgctgtgccccgacgcgcatatccgcgaggccgggctggacgactggatcaaccatttcaacctgcacgtgggcgaacgccatcatgccagcgccgatgccctggccacggcggagctgatgctcatcctgttcagccgcgcacgggcgcaacacatcgacacgccacaggcgctgcaagagcgcttgagccaatggaaacggcgtcaacacgcgcactctttttaacaccgctggtgggcgggcttactgtggcgagcgggcttgccccgcgttgggctgcgnnnnnnnnnnnnnnnnnnnnnnnnnnnnnnnnnnnnnnnnnnnnnnnnnnnnnnnnnnnnnnnnnncgcagcccaacgcggggcaagcccgctcgccacagaaagcccgttcgccacaagagcatccccccttcgaaccgacagacgccaattgcgtacactcgacggctctgacacaatcgcgaataattctcgttagtttaaacatcgcgtttaccaggtgatgccttgtcgtcgatccagaacccacgcagtgagcttgttggtgcgttgtatcgcgaccatcgtggctggctgttggcttggcttcgacgcaacgtggcctgcccaagccgcgccgaagacctgagccaggacaccttcatgcgcctgctcggccgtgatgagttgcgcgccccccgtgaaccccgtgcgtttctggtggcgatcgccaagggcttgttgttcgactacttccgccgcgccgccctggaacagacctacctcaccgaactgatgctgatcccggagagcgaacacccctcgccggaagaacagcaactgatcctcgaagacctcaaggccatcgaccgcctgctcggcaaactgtcgagcaaggcccgcgccgccttcctctataaccgcctcgacggcctgggccacgcggaaatcgcccagcgcctcggggtctcggtgccgcgggtgcgccagtacctggcccagggcattcgccagtgctacatcgcactgtacggcgagccgcagtgacggtgatcagttccaaaccggtctcggcccgcgtgctggatgccgcgattgcctggcagctgtcccttgattcaggtgacggcagcgccattgagcgcgaagagttcgataaatggctggccagcgatgaagagcacgcccgcgcgtggcgccaactgggcatgctcgaccagcggttcagcgtggcctcgggcccggcacgcgtagcgttgttgcaatcgcgcgacagcattcgccaacgcgttcgcaagctgggcagtgggctggcgagcattgcactggtgatcggcctggcgttgtttgccggcgagcgctatgtgccgatccactattggctggccgaccaacgcaccgccacgggtgaacagcgcacgctgaagctggcagacggtacggtgatcaacctcaatacccacagcgccatcgacgtgcgttttgatgaaaagcgccggctgatcgtgttgcaggaaggcgagatcctggtcgagaccggccataacgatgcgcgcccgttctatgtgcaaacccgcgacggcagcctgcgggcgctgggtacgcggtttatcgtcaagcgcgaaaacgacgccacgcgcttgagcgtgctgcaatcggcggtggctgcccagcccgaggcgctgcaccaggagcagattttcaaggaaggccagcaagtgctgatgcgcagcgacggcctcggcccactgctggccgttacccccgccaccgacgcctggacccgcggcatgctggtggtggacaacgcccgcctgggcgatgtgatcgaggaattgagccgctaccgcaccggttacctgggtgtggataaaaacgtggccgatttgcgcatcactggcagcttcccattgcgcgacaccacgctggcgcttaatgcgctgctgccgaccctgccggtgcagatcgagcagcacacgccgtggtgggtgacggttaagggcaagccttagttttagcggtgccttggctatcgctttcgcaggcaagccagctcccacacttgaccgcgttctacctgaaaaaacacggtcgaatgtgggagccgggcttgcccgcgaagaggcccgcaagcacaccttacgccccggggaaaaatattttcagcctgctctatcactttctgattctcgttcggcacataggcaattgcgaattacttccattcaggagccgccctatgtcccgcacgctagacaccttgttgcgccccagcctgttagccgtggccattgctctcagcgccccgctggtcagccctttgctgatcgccgccgagcaggcgtccagcgtgcgcgcctacaacttgccggcggcgccactggcgaccaccctcaaccagatcgccagccagggcggcctggcactgaccctcagcccggcgctggcatcgggcaagacctcggcgccggtccagggccagttcgacgcacccggtgcgctgcgtgaggcgttgcgtgggacgggcctgcagttggagcaaagcagtgcgggcacttacaccctggtgccggttccggaaggcgtcgtagcgttgccgaccaccaatatcaccggccaggacagctatgaaagcgcctggggcccggtcgacggttacctggccaagcgcaccgccgccggcaccaagactgacaccgcgttggtcgaggcgccgcgctcgatctcggttgcaacgcgccagcagatgcaggaccgcaacgtgcagaacctggatgacgcggttaaatacatgcccggcatcgtctccgccagctacggcagcgacacccgctacgactggatgcgtgtgcgcggcttcgaaccgacccagttcctcgacggcctgccgctgccacgcggtgtgtacgccaacccgaaagccgaaacctggaacctcgaccgcctcgccctgctgcgcggcccggcctcgtcgatctacggccagaccccaccgggcggcctgctggacatggtcagccgccgccccagtgccgagtcgagcaatgccgtacaggtgcaatacggcagcgacaactaccgccagatcaacttcgccagcaccggcaagatcgatgacgaaggccggttcctctatggcctcagcggcgtggtacgggatgccggcacccaggtcgatcatatcgacaacaagcgctacaaccttgcgccgagcctgacctggaacatcgacccggacaccaagctgaccttcctttcgcagttcacccgcgacgatacgggcaccaccagccagttcatgccgatccagggcaccaagatcaaatcgccgctgggcgaggtgtcccaccacaagaacctgggcgacccggactacgagttctacgaccgtacctactacgcgctgggctatgcgttcgagcatcgcttcaacgacatctggcagttcaagcagaacctgcgctacaccaagtccgagctggacttccaacagctgaccgtgggttcttatgccttctccccagcggatgcggcgggcaatatcagccggtcgaccaccaacgtgaatgaaagcatcggccagttcgcgctggacaacaacttccaggcggacttcgccaccggcgacatcacccacaccttgctgctcggcctggatcaccagcgcaccgataccacctatcgcgcgatctacggtacagcgtcgaatatcaacatcttcaacccggtcaatacccaaccgactgtgcgccctaccggcgtccgccctttttacgactacaaccagaagaccgtgcaaaccggcctctacgcgcaggaccagatggccctggaccaatggcgcctggccgtgggtgggcgtgaggactgggtgcatcagggcaccacctatttcaacgataacgatgcgaccaacaccgaccgcatcaagcacttcagtggcaacgcggcgctgagctatgtgttcgattcgggcttcgtgccgtacttgtcctacgccgaatccttccaaccggcgagcaacgccgacaccaatgccaccaagaccttcaagccgaccgaaggcaagcagtgggaaatgggcgtcaagtaccagccgcccggctccaacacgctgctgagtgcggcggtctacgacctgacccagaagaatgtgcaggtgaccaccctcggcgccggcggccagcaaatcaacagccagaccggcgaagtgaaggtcaagggcctggagctggaagccgtgtctgatgtgaccgagaacctcaaggtcatcgccgcctacaccctggcgaaatccgaggtgcaaaaaggcatctacaaaggcaaccgcctgaccttgatgccgaaccagcaagcctccctgtggaccgactacacctggcacaccggcctgctcgacggcttcggcatcggctttggcgcccgctacaccggcaacacctacggcgaccaggccaacacctggctgggcaaggccaacgcctacaccgtattcgacggcgcggtgcactacgacctcggccgcctggacaacagcctcaagggcgcatcggtcaagttgaacgccaccaacctgttcaacaaggactacctgtccacctgtgacggcaactactgctacttcggcgaccaacgcagcgtcgtcgccagcgccacctaccagtggtaatcagctgagttaaccgccgggccgcccaaggggcggctttggtgtgtctgaaggttgaaaacatgaaaagccaaaccatccgccgctggtccttcatccacacctggaccagcctgatctgcacggtattcctgctgctgctcgccctcaccggcctgccgctggtgtttcaccacgagatcgaccacctgctgggcaacgagccggaactggcgcagatgcccgccgatacgccgcagctcaacctcgagcagcttgtagccaaagcgcaggcccatcgccccggcgacgccatgcagtacctggcctgggacgaagacgacaagaacggtgtgatcgcaatcatggccgccaccgccggcaccgaacccaactcgtcgcacaccttcatgctcgacgcgcgcaccggcgaagccatggaaaccccggcggccaacggcggattcacgctgttcctgctgcgcttgcatgtggatatgttcgctggcctgccgggcaagttgctgctggcgttcatgggggttctgtttgtgctggcgatcatctccggcacggtgctgtacctgccgtttatgcgccgcctgaaattcgccactgtgcgtcaggacaaatccacccgcctgcgctggctcgacctgcacaacctgatcggcgtggtcaccctgacctgggcgctggtggtgggcgtgaccggggtaatcagcgcctgcgccgacctgatcatcgccgcctggcgccaggacagcctcagcgccatgatcgaaccctacaaaaacgccccacccctgacccaacgcgcaccggccaccgagctgttggcgattgccgccaaggccgcacccggcatggcgccggacttcatcgccttccccggcacacgcttttccagcgagcaccattacgcggtgttcatgaaaggtagcacccacctcacctcgcatttgctcacgccggtactgatcgacgccagcaccctggccgtcaccgccatcgccgaacgcccgtggtacatggacgccatgggcatgtcccaaccgctgcattttggcgattacggcggcatgccgatgaagatcctgtgggcggcgctggatgtgctgaccatcatcgtgctggtgagcgggatttacctgtggatcgtaaggcgccgagcatgaagccacgtcagtcgagtttctggaaggtctttgggattccgctggggatcggcctgctcagcgccgccgggttgtttgcagcgctgctcggcgatgggctgtgggattcgctcagttggctcgggttgggcattcccgctgcaattggcacttgggccttgctcaaacggtgagatagattagcgctgcccaatcagaggaatgcccatgtccgctcccagcatgaccttgttccacaaccccgcttcaccgtttgttcgtaaggttcgcgtgctgctggctgaaaccggccagcaggaccgcgtcgccctgcacggctgcatgccgaccccggtcaacccggatgcgcaggtggtgcaaggcaaccccgtgggcaagatcccggccctgcgcctggccgatggcacggtgctgcacgacagccgggtaatcctcgattacttcgaccaccaacacgtcggcaacccgctgatcccccgcgacggctcggcccgctggcgccgcctgaccctggcctcgatggccgacggcatcatggatgccgccgtgctggtgcgctacgaaaccgccctgcgcccggcagaaaaacactgggaccaatggctcgacgaacagcgcaacaagatccgtcgcaccctcgccgagctggaagccgacgcgattgccgagttggccagccatttcgatatcgccgccatcagcgtggcttgcgccctgggttacctcgacttccgccacccggatatgcaatggcgcctggacaacccgcagcttgccgcttggtacgcggaggtcagccagcgcccttcgatgctggaaacccagccaccgctttgacagtcactgtagtccggtgtgggagggggcttgcccccgatggcggtgggtcagctacaggtgaagtaacagacacactgcaatcgggggcaagccccctcccacactggccggtggcaaggttgagatagtcgatgatcctcgccttcatttgctgatcttcccgcaacccgatcattgcaccgcctccaggtcaaacatcaacggctcggccgccttgcgtttgcccacgccataccagtccaactttcgcgtcagtaccatcaccgtgcccagcaggccgaacagcagcaacgagcccatcagcaacgcgtagtcctcggcactcaacaacccgtacagcaagccatacaacgccgccagccccgccgaaaagcccaggccatgggcgacgctgcgcagcacgtggcacacatagaagccgatcaacaacacgcacgcactggccgagatcaggtaggccagggcgaagcctatgtgctcggacaacgacagcaacagcaggtagaagaacgccagcgcaaagcccaccaacgcgtactgcaccgggtgcaccgccaggctcttgagcacttcgaacaggaagaaaccggcaaaagtaagggcgataaacagcagcgcgtatttgatcgcacggtcgctcttgaggtactggtccaccgggtcgatgaagttcacaccgaagctgcggttgttgaagtcattgcagccctggccgtccaggcaggtttgcagggcctgttcgaggttggtggagaaaaatgaggtctgccagttggcggtaaaccccttgtcggtgacctcacgctgcaccggcaggaagttgccgataaagctggggtgcggccagttggaggcgagtgacacctggctggtcttgcccaccggcaccacttgcaattgttcggtgccttgcaggcgcaggtcgaaggcaaagtccacgacagagggctttttgctgtcctgctccggcagcgccacgtgcacgccttcacccagccagtccacctgggagcccggttcgaactccagctgctggctgcccagctccaacttcaacgcattctcgatgccgcgaatatcgctgatgcccaccgccagaaacgccggatcaaagcggtaatcggcaaagtcctcggtgatgcccagctgcgcaggcaattcgaagcgcccgctgatgcggttgtcggcatggaacagccgcgcctggtagatgccgcgtgaacgcagttcggtctgcaccttgccgtcgagttcaaaacggtccggcaggaaatacagacgaccacgctcttcacgggtgacttcgtagcgtttgttgagcttttcattgagcttccactcgcggacggtcttgcgatacggcaccaccatcaccgggccggtgaggcgctgggcgtagctggagctgcgggcgatgtccatcaggacgccgtcgcgcagttgctggcggtcgctgatgatgccgttgatcatcagcaacggaatcagcaacagcaggatcagcagcgcaatcgcgccaagtttgaaaagcaggctgcggttcatgggtctctccctgttttgatgggggagagtctgggcagcctgtgtgggagatttatgtgggcaatgtggagactgtatggagatgcagcaccacttgcacgccaccttgcacattaccgatctgcaacgcgccgccgtgcagcttcatcacttcctcgacaaagttgaggcccaggccggtgcttttgcgcccgctggccgggcgtggcagcgaatagaaccgttcgctcaggcgcggcagggcgtagtcgggaatcggcgcggcctggttgaacaggctcacctgcacgtcgttgtgccgggtctgcgcgctgaatttcaaggtgccgccaggcggtgtgaaatccagggcgttatccagcaggttgcccagggcctggcgcagcaggaagggttcgccgtacaccttcacatccgccgcaatcgtctgttcaacgtgcaatccggaaccttcgatccgcgcacattgcgccttgagcacatcatcgaccatggctgccagcaggatgctcacctgctcttccaggccctggcgttgctcgacctgcgccaggttcagcagacgttcgatcaactgctgcaggcgcgcactttcactgtcgatattgccgacgaagcgctgctgttgctcacgggtcatatcgccctgcaacagctctgccgcaccgcgtatcgcggccagcgggctcttcaattcgtgggtcagggtgtgcacgtagtgttcgacgtaggccttgccttccagttgcgtgcgcatgtgttcgacggcggtggacagctgtttgagttcgccgccacggtaatgcggcaactcggcgcgccggccctcgctgaccgcctcggcgtaggccgtcaagcgacgcagcgcaacgctcagccaccacgacagcagcgcgccgagcaacaggccgagaaccaccaggcccgcgccgtaccacagcaggcgccgctcggtgcggtcgacgtagggctgcaacgagctgttcggcttggccacggtgaccacgccgatgatctggccgttgtcacggatcggtgcgcccacgtgcatcaccgaggaagtggggtcatccagctcgctgcgtgtggagcgggcaccgtactcgccgcgcagggtcaggtacacatcgttccacttggaataatcctgccccaccgcttcgcccgtggagtcgagcagcacggtgcccttggcatcagtcacgtagatgcggtgattgacctggttcttcggcagcccccagatggtcgcgcccggctggcgattgccgtaggccttgagcagttcaggccagtggctttggccgagggtgccgttcttcacatcgtcgcgcaggatttcggccagcaggttggcggtgtccaccagggtttcttcggtggactggcgcacgccggggcgaatttccttcatcacggtgctgagcacgaagtagccggtcaggccgataaacagcgcgtacaccaggaaaatccgcagccccaggcgcatcagctgttgcctgggctgtagctgtagccaagaccgcgatgggtctggatcggctcggcgtcggcagccacattgcgtaacttgctgcgcaggcttttgatatggctgtcgatattgcgctcgtaaccggcatccgccgcgacgccgaccgcgtccaacagctgctcgcggctgaatacgcgctcgggttgttccaacaggctttgcaataggcggaattcgtgacgtgtgaggctcaacggctgaccgcgatacatgatctgcatgcgctccaggtctacctggaataccgccggcgcagcccctggaccaatccgcttgaggatcgccctgacccgcgccgtcacttcccgtgggctgaacggcttgaccacataatcgtcggcgccgatttccagccccaccacccggtcgatctcgccatcccgcgcgctgaggaacatcaccggcacttcgctgaaccggcgcagttgcttgcaggtttcaaacccggtgatgtccggcaggccaatgtcgaggatgatcagatcggccggcgtctggcgttgatgctccagcgcagcctggccgagtgtcagccaggtggtggtgaagccctcgccttgcagggcgaatatcagcgtgtcggctatcgccgcttcgtcttcgacaatcaggatgtggggcatggtggtccgtcagcagtccggtttgtcagcagtgtaacgacgcgccgggttgaccgcagcgccgaactcgcgcagagccttggcgccgatcagcagcgggtagttgaagctgctgcggtcggtgaggttgacctcgacggtgcgcttgacgtcgcccaggcacatttccaggtcgatcaccgggcgcttggccacggtggcttcgtccttgtcctcgtcctcgtcggcgcggctcttgatcttgctgatgcgcaagactttgtgttcgtagaccttattggacgcgtccttgccgccgaggcggaaacgcacccaatcgtcaccgtcacgggtgaaggtttggatgtcacgggccgacagcgaggcggtgagcgcgccggtgtccatcttggccttgaaggtttcgccgatctccggcagctggatgtattcgtagcgaccgtagagggtcggttcggcggccatgaccggcagggcagccagggccaaagaggcaaggagcagtttcacgaagtgatttcctcggaaagaagtaggcggattctagaccgcaaaagcgccggttagttagctcatcccaccatacccggcacattgtgaaacattcgtacggtgatttgcgatttggcctctagactcaccttgcttatgatggcccgcccacaagattccaagagttacttatgcgccgcctgctcaccggctgtctcgtcaccctgctgctcttgctcaacaccctcgtgctgttcggcccgttgatggtgtttgccctgctcaagctggtagccccggggcgcttgcgtgactacatgtcatgggcggtaatgtggatcgccgagacctgggccgagatcgacaagctgattttctcgctgtgcatcccgacccagtgggacattcgcggcggcggcgatctgcggggtgacaccagttacctggtgatcagcaaccaccagtcctgggtggatatcccggccttgatccaggccctcaaccgccgtacgccgttcttcaaattcttcctgaaaaaagagctgatctgggtgcccttcctgggcctggcctggtgggcgctggattacccgttcatgaagcgctacaccaaggcgttcctggccaagcatcccgaactggcggggcaggatttgaagatcaccaaagaggcctgcgagctgttcaagcgccagccagtgacggtggtcaattatctggaaggcacgcggttcagcgacgccaagcgcaggcagcagggttcacccttcaaccgcttgctcaagcccaaggcgggcggcgtggcgtttgtgctggcggcgatgggcgagcaactggatgcggtgctggacgtgacggtggtgtatccgcagcaaaagattccggggttctgggctttgatcagcggttcggtaccgaaggtgatcattgatatccgcacccgcgaactggacccggcgctatggcaaggggactacgagaacgatccggcatttcgccagactgtccagagctgggtgaaccagctctggcaggagaaggatcagcgcattcagctattgctcaagtaatacggcatggcgtcgttcaggtgccccaccatcccgataaaatgctttggcgccttcgagcgcagctttgagactggcaatcaagtcagcatcagaggtgtttaccgcgccatcgagcttcaggaacgctttcgctaccgcagccaggcgttcaagatcggccggctcaaggcctttttcggaagcttcggctttgaggaaatccctcatgctggaaagcatctcgtctccgcccaaggagttggtagtgctatcagccaccgctttcttgtaagcggcaacgaatttctccgactcctcgttcgtcggcgcttttatgcccgcgaacaatgcattggcacccagcggaaaattcgatttttgctcagattgagtgtgttccacaaaacgtcgaagatccgaaagcagttgcttgagttgcaagtccggcttcttgctgctccctgccacctcccaggcattgcgtatatcctggatcaacccggacggcagggtgaggccttgccgggccacacgaaccgctgcctgggcctgctcgaaagaaataccggaagacattgggaactgtgaattaatctgagtcattggagcaccatttcggtcagttgaagagtctctcaaataccgctcttagcgattgatgagagagttcttattaggtggccactcaacctcccacagttcccagcgctatatcacaggatattacgcagtcagtcgtccttccaacacagacgaagacgataccaatagaggaatacacgagcacagtgaccgcgcatcctcgtaagcccccccgcactggatgagcccgccacggagaggcaaaaaggcatgctgaacatccgtcagttgccagtgccccaggccgaggccaatttacccagcaatgactggttcgcaccctggccacccaagtattgcaggatcaccggcgcaaactggccgaccatgccactgtccatgcccagggcgctgaacgcagtgttcaggtcgttggtgttcttcacattgcccagcaggccgtcgaggccgctggtcttgctaccgccagcctggccgagcatcccgctcaaggccccgaggctgcccaacgcattattgcccgacagttggtcgaggcccggcacactattgcccagttgcgaatagtcgttgccgctcaatttgttcttggccaggcccagcatggcgcccgtaccgccgaccgcttgctcgggggtgatgttcagttgcgaggtcagggcgctcaacaggccggccgtctcggacgacggtgcagcagcggctgccttgttgttaccaccctgcatgccggaaatggcattggccgcgtcgccaaggctgaaccctgcggcgagcaccgggccggctgccagggtcatcaggcaggaaagggcgaaaccgcgtgaaatcttcatcgaaacaacctctgggtgtaggagctaaaagcaggcgtttgactgacagtccggaacgattgttcccacaccaaggttagttcagatttttctgcatccgaatcgcctcggcccgcgtatagcctgcatacgccactcggagttggatggaatgaatgcccaggctgaactaccctccgcttaccgcgtgcagtcccgtcaccctcgaacgagggtctggagaagctctattagcgccgatgatgctgacccattgcgccctttgctggcgcaatgtgccttaggtaaccgccaggcattcgaaaccctctaccgcagcgtttcgccgcgcctgcacggtgtagccctgcgtttcatgggccgccgggacctggccgaagaggtgttgcaggaagccttcgtgcgtatctggtacaacgcctcccgctacgaggcgcacctgtctgcgccgatgacctggatggtgaatatcacccgcaacctggccatcgatcaattgcgcaagcaccgtgaacagccgctggcagagggtcagcaagacgccttgctcgatgacgcccccagtgctcacgaccaactcgacaacgaacgccaagcccgcgccttgaaccgttgcctggacaccctcgacggcatgcaacgccagtcgatcagcgtggcttacttccagggcctgtcgtgctcggaattggccgaacacttggccgcgcccctgggctcggtcaaatcctggattcgtcgcggcatggaacgcctgcgcaggtgccttgaatcatgaactaccagaccaccgccctgcgccgcgccctcgccgccgactacgccgtcgggctgatgcccgccaccgcgcgccggcgttttgatgcgctgcttctggaggatgccgcactgcgcgtggaactcggccattggcaggacgcgctcgccagcctgaccggtgccttgcccgagcgagcggtgccggcgcatgtctgggaaggcatcaaggcacgcatagagccgcaggtgctgcatgtgccggcgaaaaaaccgttctggatgaacctgcgcctgcaggcggcggcgtttggcatcgtcattgccgtgctggtgggcgtgctctaccagcgcgacctgggaatggaatacaacgccacgctggtcgccgccaaccagcaaccggcgctgcagatcaaggcgtttgccgaccacctacaagtcgagccgctgacattggccgctcttgagccggcacgcgccctggaactgtgggccattcctgccgggggcaagccgatatcactgggcctggtgccagtggcgggcaaaggtcgaatcgcgttgaacaaaacgcagcaggcgctgctgaaaacaccgctgaccctcgccgtcagcctggagccacaagggggctcgccgacaggtcaaccgaccgggccggtgttgtatcagggtcaattggcatcactttgaggtgagatggcgccaggaacccggcgcgcagactgttagatctgtgggagggcttgcccctcccacatctggaacgcggtatcccggggatttaagccgcgctgaagagtttgtgcggatcaatcacaaacttcttcggcacacccgcatcgaactcgccatacccacgcggcgcatcatccaggctgatcacctgcacacccacgatttcggcaatgttgatacggtcccacatgatcgcctgcatcagctggcggttgtacttcatcaccggcgtttgcccggtgtggaagctgtgggattttgcccaacccaggccaaagcgaatgctcaggctgcccatttttgcggcggcgtccacggcacccggatcttcggtgacgtacaggccagggataccgatcttgcccgccacgcgcactacgcccatcagcgagttgagtacggtggccggcgcttccgccttgaccccttcatgaccatggccacgggcttcaaagcccacggcatcgacggcgcagtccacttccggctcgcccagcagtgcggcgatctgttcgtgcagcggggtgtccttggacaggtcggcaatctcgaagccctgggccttggcgtgggccaggcggaccgggttgacgtcgccgataatcaccacggcagcgcccagcaagcgggcggaagcggcagccgccaggcccacaggaccggcaccggcgatgtagaccgtactgcctgggccaacgccggcagtgacggcgccgtggtagccggtcgggagaatgtcggagaggcaggtcaggtcgcggattttttccatggccttgtcgcgatccggcagtttgagcaggttgaagtcggcgtacggcaccagtacgtattcggcctggccgccggtccagtcacccatgtcgacatagccgtaggcgccaccggcacgggccgggttgacggtcaggcacacgccagtgtgttgctctttgcatgagcggcagcggccgcaggctacgttgaacggtacggaaaccaggtcgccgattttcaggttctcgacgtcgctgcccttctcgatcacttcaccggtaatttcatgaccgagcaccaggccggtctgggcagtggtacggccacgcaccatgtgttggtcggagccgcagatgttggtggagaccacgcgcaggatgacgccgtgctcgatcttcctgccacgggggtcctgcattttgggatagtcgattttctgtacttcgaccttgccgttgccgagatacacgacaccacgattaccagacatgctttcacctcgctgttgtttttatggaactgcgttgcccgttgggtgggcagcgcgtttaagtgctcgggtacagatgctgttcttgcgttgtttgtgagggcctcatcgggggcaagccccctcccacattcgaccgcattccaaaggtgggagggggcttgcccccgatagcgtcagtcagagcaccaccgtccgattggcgttcaaaaacacccgccgctcaatgtgataccccaccgcccgggccaacgtcagcccttcgatatcccgccccttggcaatcaagtcctcgggatagtggctgtgatccaccacctccacgccctgggcgatgatcgggccttcgtccaggtcgttgttgatgtaatgcgccgtggcgcctaccagcttcacgcccttgttgtacgcctggtgatacggcttggcgcccttgaaccccggcaacaacgagtggtgaatattgatggccttgccatccagcttgcggcacagctccggcgacagcacttgcatgtagcgcgcaagaatcaccaattcggcgccggtgtcttccaccacttgccacacctgacgctcctgggacggtttatcgttggggtcgagggggaaatggtagtagggaatctggtgccagtcggccaacggtttcagatcggggtgattggacaccaccgcgaccacgtccatcggcagctggccgatgcgctggcggtacagcaggtcgttgaggcagtgatcggccttggagaccatgatcaccacttttggccggtagttcggcgccgtcagctcgaagatcatgccgaaggcttcaccccgcgtggccaggccatcgcggaacgcctgctcgtcaaaaccgtcgggctggcggaattccacgcggataaagaaccggcccgaaagccgatcatcgaacgagtgatgctcagtgacgtagcaaccctgttcgaacaggtagcgggtgaccgcgtccaccgtgccgagcacgctggggcagtcggcggtcaaaatccatgtatcaggtgcgcggctcatggggtattcctcaggcttggacgctcaggccgaattcggcggatgcatcctgcagccacaaccaccagtaatccgagaagctgcgacgaatcaccagctcccaagtgtcttcagccgtgtggcggatcaccagttgcgacttggcgaacaccgtgcccaccgccttgcccaccgggaagttgttggggtgcacgtcgtagctggtggacttcatcagcacatcgcgcacgttcgggccgctgagttcgaggatctgctggccgccgctgacattgacgacctggatatgcaggtcgcccagggcggcgcgcaggttttgctcggcggcgaattcttcaccgctcggcacgatcagcaaccactcatccgggccgagccattgcaggctggtttcgcccttgacgatcacttgcagggctcccggcaactcgatgccgacagctttgtgcacgccggcggcgaaggctgcgtcatggccgtcgccacgaatagtcaggtggcccaggagtttcttttcacgcacggtcacaccggcgttcttgcggcccttgccgaccaggctggcgaggtcggcatggtgcagcgacgactcggccttggcgccggaggtggggcgttgttggtaaacattggctgctgtcataaagcacctgttctaaatgctgtggtgtctgttctggcctcatcgggggcaagccccctcccacaggggaatgcatttcaacatgtgggagggggcttgcccccgatacaggcgactcgatccatcagatgttctggcgatcgcctttcgggtcgaagaacaccgaagaaacaatctccgcctcgatcacgctgccatcggcctgcggtgagaacacccgctcgccgatgcgcttcaagccgcccttcaccaccgccatcgcgaacgaatagccgagggagttgtgggcatagcttgaggtgacgtgaccgaccatcttcatcgggatcgactgcttcggatcaaacaccagttgcgcgccttccggcagccacaccttcggatcgaccggcttcaagcccaccagttgcttacgctcttcacgcacgcagtcttcacggttcatgccgcgccagccgatccacgagaacggtttggtgcggcccacacaccagcccatgttcaggtcgtccggggtcatcgagccgtcggtgtcctggccgacaatgatgaagcccttctcggcccgcagcacgtgcatggtctcggtgccgtacggcgtcaggttgtacttcttgccggcgtcgacaattttttccagcacgcccatggcgtagtcggcctgcacgttgatttcgtacgacagctcaccggtaaacgaaatgcggaacacccgcgccggtacgccgcccaccaggccttccttccaggtcatgaacggaaaaccgtccttgtccaggtcgatgtcggtgacttcggccagcagcttgcggctgttggggccagacagcgtcatggtcgcccagtggtcggtgaccgaggtgaagtacaccttgaggtctggccattcggtctgttggtagatttccagccactgcagcacgcgtgccgcgccgccagtggtggtggtcatcaggaagtggttgtcggccaggcaggcagtcacgccgtcgtcgaagaccatgccgtcttccttgcacatcaggccgtagcgcgccttgcccacgtcgagcttggtccaggcgttggtgtagatgcggttgaggaactcccgcgcgtcggggccctggatgtcgatcttgccgagggtggacgcgtccagcaggccgacgctgtcgcgtacggccaggcattcgcgcttgactgcggcgtgcaggtcttcaccgttgcgtgggaagtaccacgggcgtttccactggccgacatcttcaaactcggcgccgttcttcacgtgccaggcgtgcagcgcggtgtagcgcaccggctcgaagatgtgcccacagtgacggcccgctaccgcgccaaaggtgaccggcgtgtagttgggacggaacatggtggtgcccatctgcgggatggtcacgttcagcgaacgggcggcaatggccaggccgttgacgttgcccagcttgccctggtcggtaccgaagcccagcgcggtgtagcgcttgacgtgctcgaccgactcgaaaccttcgcgggtcgccagttcgatggcggcggcggtcacgtcgttctgcaggtcgacgaattgcttcggcgctcgtgctgtgggcttgtcgtgtggcacttggtaaatagccaaagtcggctcttccaggcggctcaaggcttttggcaaggtaccttccacgggcgcgaaaccggcttcgctggcagcgcgcacgccgccttcaaaaccatccgccagggagtcgccaaggccgtagacgccgttgatgccaccgacgcacacgcgtttctgcggggcttcgcccggtacaaaaccgaggatatcttcacgccaggtcggcttgccgcccaggtgcgaagccaggtggaccaccgggctgtagccgccggagctggctaccaggtcacactccagccattcacctgggctggtgactttatgcgctttcacatcgatcgcggccacgcgggcggcggtcacgtgcttgctgccacgggcttcgatcacggcgctgccggtgaggatacgaatgcctttggcgcgggcctcttccaccagcgcaccacgtgggttgtggcgcacatcggccaccgccaccactgcaaggcccgcatcgagccagtccagcgcaacgcggtaggcgtggtcgttgttggtcgacagcaccagtttcttgccgggtgccacgccgtagcgacgtacgtaggtggagaccgcaccggccagcatgttgcccggcacgtcgttgttgccgtacaccagcggacgctcgcacgcaccggtcgccagcaccacacgcttggcgcgcacccggtggatacgctggcgtaccacgccaatcggcgcacggtcaccgaggtggtcggtgaggcgttcgtgaatggtcagaaagttatggtcgtggtagccgttgacagtggcacgaggcagcagcaccacgtccggcagcgctttcaattcagcgatgacgctggcaacccattcagccgctggcttgccgtcgaggttttcacgcgaatccagcagcgaaccgccgaactcttcctgctcgtcggcgaggatcacgcgagccccaccgcgggcggcggccagtgcggcagccaggccagcagggccggcgccgacgaccagcacgtcacagtgacggttgaagttgtcgtaggtgtccggatcgttctcggtcggcgagcggccaagaccggcggccttgcgaatgtacttctcgtaagtcatccagaacgattgcgggtacatgaaggttttgtagtagaaccccggcggcatcagcttgccgccgaccttgccgaggatgcccatcacgtcattgttgacgttcggccagccgttggtgctggtggctaccaggccctggtacagcgcctgttgcgtggcgcgcacgttcggaatctgggtggcttcggtggcaccgatctgcagcaccgcgttcggctcttcggcgcccgcagcgaaaatgccgcgaggacgcgagtacttgaagctgcggccgataatgtcgacgccgttggccagcagggcggcggccagtgtgtcgccttcaaagcctttgtaggtctggccgttgaaagtaaacgtcaggactttattacggtcgatccggccaccgttggacaggcgattggtctggctcataccttctctccagaggccttggcggtgaattgtggcttctcaccgatcttgtaggtttcaagaatttcgtaggtcagggtgtcgcgggtcgcgttgaagtactggcggcagccggcggcgtggatccacagctcgtggtgcaggccacgcgggttgtcacggaagaacatgtagtcgccccactcttcatcggtgcaggcattcgggtccagcgggcgcggaatgtgcgcttggccggacgcgtggaattcctcttcggagcgcagttcgccacagtgaggacagaagatatgcaacatagggaatttctcctgttagtgggcgacggccgcagcgccgtgttcgtcgatcaacgcaccgttgtggaaacggtcgatggagaaaggtgctgccaatgggtgcatttcacccttggccaggctggcggcaaacacgttgcccgagcccggcgtggccttgaagccaccggtgccccaaccgcagttgaagaacatgttcggcaccggagtcttggagatgatcgggcaggcatccggcgtggtgtcgacgatgccgccccactggcggttcatgcgcacgcgggacagcaccgggaacatctcgacgatggcctggatggtgtgttcgatcaccgggtacgagccgcgctggccgtagccgttgtagccgtcgataccggcgccgatcaccaggtcgcccttgtcggactggctgatgtagccgtgcacggcgttagacatgatcacgctgtcgataatcggcttgatcggctccgacaccagcgcttgcagcgggtgggattcgatcggcaggcggaaaccggcgagcgaagccatgtgcccggagttaccggcagtgactacaccgacgcgcttggcgccgataaaacccttgttggtttccacgccgatgcacacgccgttttccttgcggaagccgatcacttcggtctgctggatcaagtccacgccgagggcgtcagcggcacgcgcgaagccccaggccacggcatcgtgacgggccacgccgccgcgccgttgcacggtggcgccgagtactggatagcgggtgttcttggagcagtcgaggtacggaatctcgtcggccacttgcttggcgttgagcagttcgccgtccacgccgttgaggcggttggcactcacgcggcgctcggaatcacggatgtcctgcaaggtgtggcacaggttgtacacgccacgctgggaaaacatcacgttgtagttcaggtcctgggacaggccctcccacagtttcatcgcgtgctcatacaggtgcgccgactcgtcccacaggtagttggaacgcacgatggtggtgttgcgcgcggtgttaccgccgcccagccagcctttctcgaccacggccacgttggtgatgccgtgctctttggccaggtaataggcggtcgccagaccatgcccgccgccgccgacgatgaccacgtcgtagaccttcttgggggtcggcgtgcgccacatcttctgccagttttcgtggtggctgagggagtgcttgaagaggccgaagcccgagtagcgttgcatagtcattactccaaaaccgcgctcagcgataaaccgggaaatcagcgcacagggcagacacgtgcttggccacgttggcctcgacatcggcgtcgccgaggttgtcgaggatgtcgcagatccagccggccagttcgatgcactgcggcactttgaaaccacgcgtggtcaccgccggggtgccgatgcgcaggcccgaggtcacgaacggcgactgcgggtcattcggcacggcgttcttgttgacggtgatgtgggcgcgaccgagggcggcgtccgcctctttgccggtgaggccctgacggatcaggctgaccaggaacaggtggttatcagtgccgccggacactacatcgtagccgcgtttgataaacacgctggccatggcctgggcgttgtcgatcacttgttgttggtaagccttgaagcctggctccagcgcttccttgaagcacacggccttgccggcgatgacgtgcatcagcgggccgccctgggcgccggggaatacggcggcgttgagtttcttttcaatttcttcgttggacttggccaggatcaggccgccgcgaggaccgcgcagggtcttgtgggtggtggtggtgaccacatcggcgtagggcagcgggttcgggtacaggccggcggcaaccaggccggcgacgtgggccatgtcgacgaacagcagcgcgcccactttgtccgcgatctgacggaagcgtgggaaatccagggtcttggagtaggcggagaaaccggccacgaccattttcggcttgtgttcgacggccaggcgctcgacttcgtcgtagtcgatcaggccggtgtcggtgttgatgccgtactgcaccgcgttgtacagcttgcccgaggacgacactttggcgccgtgggtcaagtgaccgccgtgggccaggctcatgcccaggatggtgtcgccggcattgatcagcgccaggtacaccgcgctgttggcggacgaaccggaatgcggctgcacgttggcgtaatcggcgccgaacagctgcttggcgcgctcgatggccagggcctcgactttatccacatgctcgcagccgccgtagtagcgcttgcccgggtagccttcggcgtatttgttggtgaggccgctgccttgggcttccatcacgcgtttgctggtgtagttctccgacgcgatcagctcgatatgatcttcctggcgctgctcctcggcattcatggccgccagcagtgcgtcgtcatatccctggatctggtcttgtttgctgaacatcgcgtctctcccagcctttcgtattgttgaggcccgtgcagggccctttgatgcgatggtagggctggcgcagacaggtcaaatgcctacgcacgccacgcaaaggtgcgtttacgacatagcgggaacaacgcggaaaaaatgtgggagggggcttgcccccgattgcaaagtgtcagccaccgcatctgcaagctggcccaccgctatcgggggcaagccccctcccaccagggtttatacgatgatctggcggatgagtagcagcagcaggaaatgcaggggatagagggtgtaggcccagcgacgcatggcgggtggcgagatgtttttcccatgtcgcaataagaccaagcctgccaatggcgcaatcaggcacgcagccaaccccaacagcgccacaggcgtgccgctatcgagcaggatttgccattggttggcggcgacacagaccaaacctggcaatacgctgaaataccatgggcgactgaacaccaatagcatagccagcggcagcaagaccccaaacaaaccgaacatcaactgcgcggaaaacacggccgcaatcgtgacggcaattagcgccaatcctcgatcaaaaagcgccttctgctgccatcctcgggcaaccagcaaacccagcgccagggttggcaacacattcaacgtatcggcatcctcgattaacatccgatacggcacctcgctgatcacgctgaacagcaacaaccagcccaggtaactcccgctcaccggcgcgtttttcgcccggtgcaaattcgccgcaatcgccaggcaaaaccacggaaatgccaggcgccccggcacatacaggccatccaggcttaaaccgacatagcgcaggtggtccagcaccatactcaacagcgccagccacttgagcagatccaaggcgccatcgcggacacgtccgacaggcatcgttccagtaccgtgcataattccccagtgactttgcatttacagagcgtgcgcacccgcgacaatcttggttacagtgcgcaccaacatcgaccacaggaatgggccatgaccgacaagagccaacaattcgccagtgacaactattccggcatctgcccggaagcctgggccgccatggaacaagccaaccagggccatcagcgtgcctacggcgatgatgaatggacccaccgcgccgcagacggtttccgcaacttgttcgaaaccgactgcgaagtgttcttcgccttcaacggcaccgccgccaactcgctcgcgctgtcttcgctgtgccagagctaccatagcgtgatttgctcggaaaccgcccacgtcgaaaccgacgaatgcggcgcgccggagtttttctccaacggctccaaactgctcaccgcccgcaccgaaaacggcaagctgaccccggactcgatccgcgagatcgccctcaagcgccaggacatccactaccccaagccacgcgtggtcaccctgacccaagccacggaagtcggcagcgtgtacaccccggaagaaatccgcgccatcagcgtcacctgcaaagagctgggcctgaacctgcacatggacggcgcacgcttctccaacgcctgcgcgttcctcggctgctcgcccgccgacctgacctggaaagccggtgtggacgtgctgtgttttggcggaaccaagaacggcatggccgtgggtgaagcgatcctgttcttcaaccacaagctcgccgaggacttcgactaccgctgcaaacaggccgggcagttggcgtcgaaaatgcgctttctttcggccccgtgggtgggcctgctggaaaacgacgcctggctcaaacacgcacgccatgccaaccactgcgcgcaactgctgagcagcctggtggcggatattcccggtgtggagttgatgttcccggtgcaggccaacggcgtgttcctgcaactgtcggagccggctatcgcagcgctgacggccaagggctggcgtttctataccttcatcggcaaaggcggcgcgcgcttcatgtgtgcgtgggataccgaggaagagcgtgtaagagaactggcggcggatattcggaaagtgatggaagcctgatgccacgggcatttcagcccgatttcagagactgtttgtacgtatttctgacagtatctatctagcccctgccctggataagatctcgtcaccccgaacgcaacggacgcgttgtttcggggctgactgcctgccgaatagtcggctggaaatggaaatcccacagagggcaacatcatggaaattcaatgctacacgactgattctcagcttcgatccgaggccaacgccaccctcgtcggcctggacgacctgaggaaactggcgaatgttggtgacactatcatcgagccttcaaggctctttaccgtcaccggtaaagagttcgaaatgacagcatccggtgcgtacatcatcaacctgttcgtgcgttaaccactgactgtgggaggggggcttgcccccgatggcggtggggcattaaccaatgcgctgactgacacactgctatcgggggcaagccccctcccacatttagaccggcttcgttagtcagaactcgatacgcacatcacccttcggcacgctgcagcacgacaggatgtagccttcggcctcatcttcctcggtaatcccgccgttgtggtccatctcgacctcgccgcccagcttcagtaccttgcacgtcccgcagatacccatgccacaagcttttggaatcaacaggccaagcttggctgctgctgcgtgcacggtttcgcccggcgccacgcgaatgctcttgcccgacgcaatgaactccacctggtgcagatccgccaggtcgatttccggtgcgtcggcggcctgctcggcttgctccaccgcatccgcacgggcctccggcggcgtggcgccgaaggactcctcgtgataccgcgtcatgtcgaaacccgccacttccagcaggcgcttcaccgcgttcatatacggcgtaggcccgcagcagaacacttcgcgctcgaggaagtccggcaccatcagttcgagcatcttgtggttcaggtaaccgcgataaccggcccatggctcacccaacccgtgtttctcgcagatcaggtgcaggctgaagttgtcgatccgcgacgccatgtgctccagctcgcggtggtaaatgatgtctttgggcgagcgggcgctgtggataaacgtcatgtcgacgttggcgttggtgtcgtagaaccaacgggccatggacatcaccggcgtgatgccgacgccgccgctgaggtacaacactttcgggctaggaaagtcgatggcattgaacaggcccaccggtccgtgtaccgcgagctcctggccctcgtgcaacgtgtcatgcagccagttggaaaccttgccgcccggcacgcgcttgatggtcaccgagaagctgtacggcaccgacggcgagctggaaatggtgtaggagcgcatgatcggctggccttcgatctccaactccagggtgacgaactgccctggcttgaagaagaacaggatcggctggtcggccataaagcaaaaggtgcgcacgtcccaggtttcctggatgactttgacgcaccggacgatgtgccgaccattggcccaggtctgggtggttaccggattcaggaaattattggacatgttgttctccaccgccgacgtcggccttatggtggcgattctgcgtaacgccggaaccacccatttacctatctgcgacattcacatacttatcgcgaccagcccccaacgacctagggttgcgcgtcgggaacagattgggccatgtcgcccatggataaggttctgacgttgcgcggccccacactcgctcccaacaacgacgctttctttatgccttgcgtagtacaaccgtagccactattcgccggccacacagaatggccatgaggacacacacgatggacgtcaccgcaaccttaagcttgggcgatccgctggaacccgcacgcaaggccaccgcgcagatgctgcaagagcgcgagcgcactttctcgctgccgcagccgttctactctgatgagcggctgtttgatatcgacatgcaggagatcttccagaaagagtggttgatcgccggcatgacctgcgaaatccccaccaagggcaactacctgaccctgcaagtgggcaaaaacccgatcatcgtgatccgtggcgccgaaggcgtggtgcatgcgttccacaacgtttgccgccaccggggctcgcgcttgtgcaccagcgacaagggcaaggtcgccaaactcgtatgccactatcaccagtggacctacgaactggacggtcgcctgctgttcgccggcaccgagatgggcgccgacttcgacatgaagcagtacggcctcaagccagtgaatgtgaagaccgccggcggctacatcttcatcagcctggccgagaacccgccagccatcgatgacttcctgtcgacgctgaaccactacatggaaccctacgacatggagaacaccaaggtggcggtgcaaaccaccttgatggaaaaagccaactggaagctggtgctggaaaacaaccgcgagtgctaccactgcaacgcatcgcacccggaactgctgaaaaccctgctggaatgggacgacgtcaccgacccacgcgccgaccaggcgttcaaggaccatgtggccgcctccgccgccgcctgggatgccgagaagatcccttacgcccacgccagcttcggcctgcgtaaccgcatcgtgcgcatgccgctgctcaagggcaccgtatcgatgaccatggacggcaagcagggctgcgccaagctcatgggccgcatcaagaacccggacctgggctcgatgcgcatcctgcacctgcctcactcgtggaaccactgcatgggcgaccacatcatcgtgttcacggtgtggccgatcagcgcccaggaaaccatggtcaccaccaagtggctggtgcacaaggacgccgtggaaggcgtggactacgacgtagcgcgcatgcgcgaagtgtgggacgccaccaacgaccaggaccgtcgcctggccgaagagaaccagcgcggcatcaactccaccgcctaccagcctggcccgtattccaagacctatgagttcggcgtggtgaacttcgtggattggtacagcgagcgcatgctgaacaacctgggcgcagcaccggcaccgtacctcaaaggcgtgcctgtacagggataaaccgctttttgtagtgagcgggcttgtcccgcgttgggcggcgcagccgccctgaaaccagacaccgcgacctgcctggcagagcgcggtgtttttattggggcggctgcgccgcccagcgcggggcaagcccgctcactacaaataatctgcccatgccgcaagctgggtattttttgatcacttccttgtaagccaggtgttacctgggctgtgaagcagcaccaacatcttatccacagaaacgcgcacagactttgtgggcaactgtgctgcgcactgtggaaaactcgccgtgaccccaggtaattcgagaataggcacaatcgatcattttttgatcacaccgatcaaaccccttgtttacgggccttttatcggatagcaaacatgttatccacataaccaccaacagactttgggggcaacttttaatcctttgtggaaaacccaataaagaccatgaaaatcaaggcttccactgacattttcatgccaaatgcgcgattctggtcatattttaatcacccccaccaaagcctttatttataagggctagagccgacagcgaacatcttatccacagaagcgccaacagactttgggggcaactctgcatcggagaatcagcttgattggcgaaaaacctgaataaaaaccgtcagttagcctggttgtttttcgtacagagggctggagagcttgaaatacaaggggtgcggacagccgcgaacaggttatccacaagtggatcaacagggattgtgggtaagaaccctgtaggaggaggcaagcccccttctacagtctgggttcagcgcaccacgccttcttcgatgagtagctggagaatggcctctgcgcccgcctcagggctcaggcctttgagcacctgcccaccaccgccactggccttggccgttgcagccttcatacggtcagcgccgcttttggccttgatcaccttgaggcgcttgggccgtggcttggccggctgcaacaccgcagcattgaacaactcatcctcttcaatctggacgtcatgcgccgccaactcgccgcgctgcgccgggccgtaggcgctttgccgtggcttgggtgcagcgttatccacggtcgccaggaacggcaaacgcaccttcaagcgccgccgctgaccacggggcaaggcttgcagcacatgggccacgccgccctcaatggactccacctgcgccagcccgacgatcagcggccagcccagttgctcggccagcaggaacggcagcatgcccgagccttcaccggtttcggcctggctgccggcgagcaccacctgggcaccggcatcgcgcaggtactcgctgagcaccggcaacgcatcgctgcccgccggttgctccagcacatgcaattgcggcaggcccatgcccaggtagctgcgcaaggtcggttcggcgatgttgccggcgtgcagcacctgcaacttatcccccgccatttgcaggcccagttccacggcacgcgcatcctgctcggcacggcgcgggcgcccggaggtagggtgggcgccgatggacaccaggctgattacattcgtgttcatgaccatatccttaagctgcatcgcgcttggcgccattgcggtaggcctcgaccgctgcgatcaaggcatgcagtattgcggcgctttcgccgatcaccgacaggtcggcacgcttgatcatgtcgcagccagcgtcgaggttgatcgccaccaccttgtcgcaagcaccgatgccttgcaggtgctggatcgccccggaaatacccacggccacgtagacccgcgccgtgacccaggtgccgctggcgccgacctggcgatcgcgcgccatgaagccatcgtccaccgccacccgcgaggcgccttcggtggcgcccagggcggcggcggtctggtggaacagcgcccagtccttcacgccgttgccgccggagaaaatgaactctgcctcggccatcggaatcgccgccgggtccaccgccaccgcgccgaggtcttcgatgcgtggcaggctgcgtgccagggctgtggataactctacgggcagcacttcgtgacgggtctcgctgaccgggtcggcacattcggcagccgccaggatcaagcgcggcagtggccgagccaagtcttcctggccagcaccggcacggccgatgcactcgtcacccttgatctgccacacccgcgtggccgggcgctccttgaggctggcggcaaagcgccgacccaactcgccacccccgctgcggctgtccggcagcagccagtggcgcgggttgagctggttatccacagcccgcaggccctggacgcgttgctccggtgaataaccgtcgaatgcatggccttccagcaccagcaaacggtcggcacccgccgtggcaaacgcactttccttgtgttcaccaaacaccaccgccagcaccgcgccgtcgctgccggccagttgccgtgccaggccaagcaggtcgcggtcgtgactgctcaggcggccgccgaccatgtccggtaccacgttgatgtagaacgcgggggctgcaatctgatgcagcggcaattgcacttccaccgctgccgtacgtttggccgcaccgccctgctgggcgccactgcggtcgatgcgcttgatgccgttggggccgataaaaccgacgccatgcacattcttgcggatgacgccgttaggccccatccagctgtgctgcaccggttgcattgccgcatgcagcgggtgcaggcggttgcgggcgatccattcggcccgtgggtcgcggcggataatgtcgctcatcagtgcacctccgcaggttcacgcttgagtggggctttggccggtgcagcgccttccagcaatgcgtcggccaccagctcggcaatgtccttgatcaatgggcgcggctcgaccacgccttccagcatcgcggtgcattgcgggcaacccacggccaccagctcggcaccggtttcgcggatgtcttccatgcgcatatcggggatacgttgcttgccgggaatgtcagtgatcggcgcaccgccaccaccgccgcagcagcgtgaacggaagcccgagcgttgcatctccttgacctcgatgcccagagctcgcagcacttggcgcggcgcctcgtattcgccgttgtagcggcccagataacaagggtcgtgataggtcacgctgttacctttgtgctgccccaggttcaacgcgccctcaccgatcaactcggccatgaaggtgctgtggtgctgcaccacgtagttgccgttgaaggcgccgtactcgtttttcagcacatggaagctgtgcgggtcgcaggtgacgatgcgcttgaagctgtacttggccagggtctggatattgcgcgaagccagcagttggaaggtcgcttcatcgcccaggcgccgggcgacgtcgccgctgtcgcgttcttccaggccgagcacggcaaagtcgaccttggccgctttcagcactttgacgaaggcgcgcaaggtgcgttggttgcgcatgtcgaacgcgccatcaccgacccagaacagcacctcggcactacctttttcgctaagcaatggcaggttcaaatccgccgcccagttcaggcggccacccggcgcgaagccgccagggttgtcggtggcgatcaggttttccaggacttcggcgcccttgttcggcgtggcgcccttttccaaggtgaggtggcggcgcatgtcgacgatggcgtctacgtgctcgatcatcatcgggcactcttccacgcaggcacggcaggtggtgcacgaccacagggtctcggcgtccaccaggccgttgacgatcggctggtgcgggttgccgccgtgctcgcccacgggtttgcccggatacgggctgccggcgaacctggcatcggtgccgccagccaggccgaccaccatgtcctggatcagctttttcgggttcagcggctggccggcggcgaacgccgggcacgcggcttcgcacttgccgcactgcacgcaggcgtcgaaaccgagcagttggttccaggtgaaatccttgggtttctccacacccaggggcgcagtcttgtcactgaggtccagcggtttcaacccggtggaacgcccaccgccaaaacgctcggcgcggcggtgccaggccaggtgcagagcaccggcgaaggcgtgtttcatcgggccgccccaggtcatgccgaagaacatctcggacacgccccacagcacaccgacgctgagcaatgccgcgagcagccagccgccgaagtccgccggcaggatcccggccaccggcagcgttaccaggaagaaactcaccgagaacgccatcaggcttctcggcaggcgcatccacgggcctttcgacaggcgcgacggcgggttgcgccgacgcagatagacgaaggtggcgccgacaaacatcagcaccgaggccagcagcaaggcgtagccgaggatacggttgtgcaggccgaaaccgtggaccaggatcgccagcaaggccgacagcacgaagcccaacgcggtggcgacgtgggtattggcgatgtatttgtcacgggcgaccacgtggtgcaggtcaaccatgtagcgcttgggcatggccagcaggccgcccagcaggtcgaccttggacgcgcggccacggcgccacatgttcacccggcgcagggcgccgaggacggcgaggcccagggcggtaaacaagagaataggcagcaaggtgttcaacatggtgaagctcccacagaccgcacaggtctactgtgaaactggcgctgaatgtgggagggggcttgcccccgatagcagtgggtcagctacagctgtatcaactgacactccgccatcgggggcaagccccctcccacatttggagcgagtacacattggttcaaggctggctcagaaatctttgcagaggcgcagggcgtcgtagatcgcagcgtgggtattacgctgcgccacacagtcgccgatgcggaacagcaagtacccatcgcccgtctcgctaaggcacggctgcggcttgatcgcgaacaaggcttcgacgtcgatctggcctttgttgcgcgagccttccttgagcgcgtagtagatggcttcatccggacgcacgccgttctccaccaccacctgatcgaccacccgctcctctttggcgccggtgtattcgttctccagcaccgccaccagcttgtcgccctcgcggtagaccttttccagcatcatgtcgccggtcatgatcacttccttggggtacatgctgcggtagtaggtcgggaacgacgtaccgccgatggccacgcccggcttgatgtcgtcggtgacgatctcgacctggctgcctttgtccgccaggaaatccgccaccgacataccggtgaattcgcagatggtgtcgtacaccagcacgttcttgcccggcgccaccttgccgtcgagcacgtcccaactgctcaccaccaagccttcagcggcgccccagtgttcgttctgctccacattcgggtgcccgcccaccgccagcaccaccacatcggggcgcaggtccaggatggtgtcggcatccgccgccacgcccaggcgcaggtcgactttcaggcgcgccagttccaactggaaccagcgcgtaatgccggcgatctggtcacgctgcggcgctttcgaagcggtggtgatctgcccaccgataaattctttcttctccaacagagtcacatcatggccacgttcggcggccacgcgcgcagcttccatcccggcaggaccggcaccgaccaccacgaccttgcgtttgacgccggtggttttttcgatgatatgcggcacgcccatgtattcacgtgacgtcgcggcgttctggatacacagcacatccaggccctggtactggcggtcgatgcaataattggcaccgacgcactgcttgatctggtcgatctggcccatcttgatcttggcgatcaggtgcgggtcagcgatgtgggcgcgggtcatgccgaccatgtccacataaccgccttccaggatgcgcgtagcctggttcgggtccttgatgttctgcgcgtgcagtaccggaaccttgaccacttccttgataccggcggccaggtgcaaaaacggctccggtggataactcatgttcggaatcacgttggccagggtgttgtgggtatcgcaacccgagcccaccacgccgatgaaatcgagcatgccggtgtcgtcgtaatacttggcgatctgcttcatgtcctcgtgggacaaaccgtccgggtggaactcgtcaccgcacaggcgcatgcccacgcagaagtcgtcaccgacctcggcacgcacggccttcagcacttccaggccgaacttcatgcggccttcaaaggtgccgccccattcgtcggtccgcttgttgacccgtgggctccagaactggtcgatcatgtgctggtgcacggcggacagttccaccccgtccaggccaccggccttggcgcggcgtgcggcctgggcgtagttgccgatcacgcgccagatttcttccggttcgatggtcttgcaggtggcgcggtgcaccggctcacgcacgccggacggcgacatcagcgtcggccagttgaagccgtcccaacgcgagcgacggcccatgtgggtaatctggatcatgatcttggcgccatgcttgtgcatggcgtcggccaggttctggaagtgcgggatgatgcggtcggtggacagattgaccgaactccaccattcctgcgggctgtcgatagccacaacagaggaaccgccgcagatcgccaggccgataccgcccttggctttctcttcgtagtacttcacatagcggtcagtggtcatcccgccgtcggtggcatacacctcggcgtgggccgtactgagcacgcggttgcggatggtcagtttgccgatctggatcggctggaacattgcttcgaaagccatggcacggtcctcggcttacaacggcttgacggtgaacaggccgtcatcgtggccctcttcggagcctccgtagacttgttcggccacagtgcggatcttgctgccacgggcctcaagaatctggtccatggcaccggcaaaccagccggtgaacatgtagtcgaccttgcgcccgaccttgccgtacacgtagacgaacgccgagtgttcgagcttgacgctggcggtgcctttgtcgaggtcgatgtcctggatcttgaacaggccccagccgcgttgcgacaggcgcttcatgtagtgctcgaacaccgcgacgccttccaggccgtggcattcggcttctttctcgcaccagtgccaggcggacttgtagccggccttgtagaggatttcggcgtaagcctcggcgcccagcacttcttcgatgcccatgtggttgttgacgaagaaatggcgcggcacgtacagcatcggcagggcgtcggaagtccagacaccggtttcgctgtcgacttcgataggcaattgcggggcgatcttggccatggaaacttaactccagaaaattcttgtgtagtgccccggcgcggatggccggggaagaagatgcggtggcggtggcttactcgccccagacgtccttgaggacgttgacccagttctcgcccatgatcttgcgcaccacacgctcagggtggccgcgtttgagcagggtctcggtgaggttggggaactcgcccacggtgcggatgcccagcgggttgatgatcttgccgaagctggtcaggcggcgtgcatagcccttgtcatgggtcagcatttcgaagaaatcctggccatggccctgggtgaagtcggtgccgatgccgatggcgtcttcgccgacgatattcatggtgtattcgatggcttcggcgtaatcgtcgatggtcgaatcgatgcccttggccaggaacggcgcgaacatggtcacaccgacaaaaccaccgtggtcggcgatgaacttcagctcttcatcggacttgttgcgcgggtgttctttaaggccggacggcaggcagtgggagtaacacactggctttttcgattcgaggatgacttcttcggacgtcttggaacccacgtgggacaggtcacacatgatgccgacgcggttcatctcggcgacgatctcacgcccgaagcccgacaggccgccgtcgcgctcgtagcaaccggtgccgaccaggttctgggtgttgtagcacatctgcaccacaccgacgccgagctgcttgaagatttcgacgtagcccaactggtcttcaaacgcatgggcgttctggaagccgaagatgatgccggtcttgccctgttccttggccttgcggatgtccgcggtggtcttcaccggaatcaccaggtcgctgttctcacggatcagggtctggctggccacgatattgttgatggtggcctggaacccttcccacaccgacaccgtgcagttggcggcggtgagcccccctttgcgcatgtcctcgaacaggtcgcggttccacttggcaataatcagcccgtcgataacgatgctgtcggcgtgcaattcggctgggctcatcaggcgtccccttattggcgattcatgcgccgaatcgtctgccggcgctttggggccagcatatgcccaggggccgacagagccgggtgcaaaaacgacaggggaattgccgaaagcgtcaatccgcgacaaaggctgttaagagaggtctgactcgcggctgttctttgtcttacgcttgagccagaattcgggcattacctgatatgagacggcgcaatgaaatcgattttcctggctttggcactcatcgcaaccggcgtccacgcggctgaagacaccgacagcacgccgtgcgacggcatcgaaaacgacaagcaaaccctggaatgcgccacctataacaaaaccaccgccgaacaactgctcaaagacaactatcaaggcctgctcgaacgcatggcgtcgacctacggcagcgacaagaccaagctggcggacattaccgctcgtctgaaggatgcccagcagaagtgggaaaaactgcgtgatgctgattgtgccgtggacaccttcccggcggtgaccggcaccaaggcctatgcgattgcacagaatgactgcctggcacggatgagtgatgagcggtcggagtttttggagtcgattgggcaagagtgacggttaaaaggccttccatattgagttgaaggccatttgcagatgatcacgctgagtcttgtcgatattgaggtccgcgcaatgctggccccactgcgataaggcctccatcgtctgctcgatgtaaaggtcgggctcgagaaagctgaagggtgcgcagaccttcttgatcgcctggcgtgatggctggcctgcacctgcaaaagcacaggtgtgctcattcccgccaccgctggtagtggcaaacgtcaggtcataggctggcgccatctgccagccagccgaagagccgaagaaagagaagtttttcgcgtgatcgtcgcgattgtgtgccaacgcattgaagaccatcagccgggccattttctgcacatccccggcgttttgggtgatggcgaaggtcagacgcaacaggtcgccgtagtcaaggctgggcatgcggaaatcggcatacaggatcgccgcgctggtcagcatatgacgcttgatgtggccggtgcggtcaaagcgtcgagtgctgaagaaacgttctacgccggtatccgtctgcacctcgagcaagcttgaatccgagatctcgacccccgcgttacgagcgaccatggcgtaggcttgctcgatagcgccactgtcgcgaggctcgtcctggctgcggaatttgatcaaccagtgttcatagccttcaggcatatcgccaaatgaagagatggcctgcgtcttgtcggccgaaagcccaatcaccgcttttggtcgcgcaccaccgggagagccgcccgccaggcgcaatgactcgatcacctcatgcgtttccccagacaacacgttttgcgaagcctggtaaagggaggccaggtccaactcgcctggctctggatccttctcgaacatcggcctgtactccagcgcccccatgccccggttgcccatataggccagccggtccaatgggcggatcgtacgccgttcaatccccagttccatgcgaaaaaaccggtccatcagcaacagcccccagccatcgggcaacgaatcgctgaacgctcccggcaggccaccgaacagcaacgggtcggctgccaactgaggcgtagaagagaagtccatgtacagcggcgccaagttgaagccgttcgccagccaacccggatcatacgaaaaataaattcccctgccgggcgcatccaccagctcaccgacgtgtgaaccttgcaacatgacgtgcaatgcggagactgttttcatcgacgtcctcgaagcctggtttgacctttcaattcctgaagactgatcggcggcggcgcgctgaacagattcgccatttgtgcgcctacccccaggctcatcgcaatcagcagcaaggcatcaagggaaacctttccggtcgtttcaaagcgcttgagcgtggactcggcaacccccgactgggctgccagggctcggcgagaaaggttcttgctcagccgcagcgccttggcattccctgcgatctgcaaagcaatctcgccgggggcgtagagaatatgagtaagggccatggttcgacctcaagtgagtgttagcaagtgtagcaggcgctgaataaacctatcacataacggacaacgggttatccaaaaatagactttattgttaataacagacaatattttatctcttatatttttatgagtttcatctggcctgcgacacctttgacccttctcgaaaggtgcgcgaccatctgcgccatctcacatccttcaaggccagaccatgaaaacctgcggcatcgaaatcaaaggcagcgaagccatcatcgccgtcgcgtcactggacaaccagacgctggcccacgtcgccctggcgaccaagaaaattgccctggaagacgacgacgaggccgccaacgtcaaagccttcgccgcacaggtaaaggcatttgtgcaggaaaacgccatcgagcgtatcgcgatcaagaagcgcagcaagaaaggtgaattcgccggtggcccgaccacgttcaagattgaaggcgtgtttcagttgctggatggggttgaggtgacgttgctgtcgccgcagacccttaatgcgcagaataagaagcacaacttcgaactgccggcgacgctgaacaagtatcagcatgaggcttacaaggcggcgtgttcggcgctgctgaagaaataggccacatcattaatctactgtgggagggggcttgcccccgatagcggtgggtcagccaacgttgtatcaactgacagcctgtcatcgggggcaagccccctcccacatgtcagcgcttgttgcgcagccagtcgccaaaggttttgtcctccagggcataccctccccggctcgacttccacaccagctctttatcgcgaagggcatcgatacaggcctgaatcgtctgggtgcccggcaccacgtcgctgcccatgtcctccagcgccttgctgaccgccgttagggtgctgtcggtgaacggcgcgaagggttcgttgttttgcgagcgctccaccatcacttccagaacggcgcgctgggggatggtgaggttgttccaggcgctttcgaattcggtccacacaccggcacgcagcagttcggcacgactgtgcagcaactggccgaggttgctggcctcacccagctccagtgccacttcaccgatgatcgtgcgcaacatctcgggacgccggccgaccagttcaaaggcttcatcaatatcggcggcgttgaattggttggtcttggccaggtgcgcgttgaggtgcgcggtgtaggcctgggtgaactctttacccagcagcgggaacggcgtgatgctggagccgaagaacggctgacttttacccagtaccaagtgagccagcttgtcgcgattggagccggtgaacaccagatgcaaaccgctgccgtcctcgtcacgcccttggttgagctgatcccgggcagccttgagggcgaacatcgcattgatgcctgaatcgctggtcaaggcgtgctgggcctcgtcaatcaccagcacgaccggtttttccgcagcgcggtggagcaactccaaggcctgggtcaacgtcgcgccaagcggcaattgaggcttgctgaagtcccaggacagggtacgcagaaagctcagtttctcgattccaatgtgcttggccagcttgcgaatgcccttttcatagggcaccagcgcggcagcaatagcactggcaatcaactccgcgggatctttctctttgtctgcccacagatcgacatacacggtaagccaacctcgaagctgacactccgggatcagatcttcacgtaaaaaagtacttttgcccgtacgacgcggcgctgcgagaaacaggccagaggtgaaatcctggatgcctgcgcctaccagcccgtcggcaatgctgcaagccagggtggggcggcggaatacaaagccgctgtgcttggacatggttttatactcaattatggaaaggactataaattatagtcgcgagtataattgactataattgcccattacaccacctcccgtcgccgatcctccctcggacatttcgcaaaccgcgcccgataactgcgggtgaagtacgacggcgactcgaacccgcacgcaatactcacctccagcacgctcataccgctttggcgcaagagctgccgggctttttccaggcgcaggccaaggtagaagttgctcggggtgtcgttcaggtgcaggcggaacaggcgctccaactggcgccgggtgactttgatcgcctcggccagggccaaggtgctcagcggcggttcggtgtgctgttccatctcaccaatcacttgcaccaattttttgttgttgatgccgtagcgtgtggcgatctgcatgcgctggtggtctttgcgcgggcggatgcgcccgagcacgaattgttcggagacctggatcgccagctcggggccgtgggcctgggcgatcaggtcgagcatcaggtcgatggaagcggtgccgccagcgcaggtgatgcggcggcggtcgatttcgaacagttcctgggtgaccgtcaggtgcggataggattccttgaacgcgtcgatggcttcccagtgcaaggtgaggcggtggccgtcgagcagcccggcttcggcgaggacgcaggcgccggtgtcgatggcgccgagggtcacgccatcgtgatcgaggcgacgcagccagtgctccagcgcaggcgtggcgaactgcagcggctcgaagcccgccaccaccaataacgtcgcgccctttttcaacggttccagcgcagcgtcggcgttgaccgacatgccattgctcgccagcaccgcgccgccatcggcactcaatacatgccagcggtacagctcgccacgaaagcggttggccacccgcagcggctccagcgcagagataaagccgatggccgaaaagcccggcatcagcagaaagtagaaatcctgggacatggtggcgctctcgtaggacgggcagcgtgctcactgtgatacgccagttcaacgagccattcaagggcacaggtcgctgcagtgcaagagctggtcgccgccgtgcgttttgtcggccctcaagctgcgtaatttgatcccacggcgcacaaagacgccggcccccacaataacgacctgccgagggacccaccatgaaccgactgatcagccgctgcgtgctcgcactcagcgccagcgccatcttgagcacgaacgtactggctgccgacgcggcatcctgccagaacgtgcgcatgggcgtggtgaactggaccgacgtaatcgccaccagcgccatgacccaagtgttgctcgacggcctcggctacaagaccaaacagaccagcgcctcccagcaaatcatcttcgccggtatccgcgaccagcgcctggacctgttcctgggctactggaacccgctgatgacccagaccatcacgccgttcgtcgacgccaagcaagtcaaggtgctcgacaagcccagcctggaagacgcccgcgccaccctcgccgtgcccacctacctggcagacaagggcctgaaaaccttcgccgacatcgccaagttcgagaaagagctgggcggcaaaatctacggcatcgagccaggctcgggcgccaacacccagatcaaggcgatgatcgccaagaaccagttcggcctgggcaaattccagctggtcgagtccagtgaagccggcatgctcgccgccgtcgaccgcgccgtgcgccgcaaggaagccgtggtgttcttcggctgggcgccgcacccgatgaacgtcaacgtcgccatgacctacctcaccggcagcgacgacgccctggggccgaacgaaggcatggccaccgtgtggagcgtcactgcaccgaactacgccgagcagtgccccaacgtgcacaaactgctgaccaacctgaccttcaccgccgccgacgagagccggatgatgcagccgttgctggatcacaaggacgccatcgagtccgccaaacagtggctcaaggatcacccgcaagaccaggcccgctggctggaaggcgtgaccaccttcgacggcaagccggctgcggccaacctgcaactgaccagcaaataacctgattcgaatcaccgtgtcgcagccattcccggctgcgcacggcatcactacgcccgcctgtaaggaacctgcctcatgaaccacgacgtcatcatcacctgcgcactcaccggtgctggcgacacgaccagcaaaagcccacacgtgccggtcacccccaagcaaatcgccgccgctgcggtggaagccgccaaggccggcgcgaccgtggtgcattgccatgtgcgcgacccgcaaaccggcaagttcagccgcgacgtcgccctgtaccgcgaagtgatggagcgcatccgcgaggccgacatcgacatcatcgtcaacctcaccgccggcatgggcggcgacctggagatcggtggcggcgaaaacccgatggagttcggccccaacaccgacctggtcggcccgctgacccgcctggcccacgtcgaagcgctgctgccggaaatctgcaccctggactgcggcaccctgaacttcggcgatggcgacaccatttacgtgtccaccccggcgcaactgcgggcgggcgccaaacgcatccaggagctgggcgtaaaggccgagctggaaatcttcgacaccggtcacctgtggttcgccaagcagatgatcaaggaaggcctgctcgacaacccgctgttccaactgtgcctgggcatcccatggggcgcaccggccgacaccaccaccatgaaggccatggtcgacaacctgcccgccgacgccgtgtgggcaggcttcggcatcggccgcatgcaaatgccgatggcggcccaagcggtgctgctgggcggcaacgtgcgggtcggcttggaggacaacctgtggctggacaaaggtgtgcttgcgaccaacggccagcttgtggagcgggcgagtgaaatcctcagccgcctcggcgcacgggtcatgaccccggccgaaggacgcataaaaatgggcctcaccaaacgccgctaatcaaaaaatgtgggagggggcttgcccccgattacggtgcatcagtaccgaatgtatcgactgacacaccgctatcgggggcaagccccctcccacactgggccaccgaaatccataggaatgtgccatgagctttatcactgaaatcaaaaccttcgccgccctcggcagcggtgtcatcggcagcggctgggtgtcccgcgccctggcccatggcctggatgtggtcgcctgggacccggcgcccggtgccgaagccgcactgcgcaagcgcgtcgccaacgcctggggcgccctggagaaacaaggcctggcgccgggtgcctcgcaagagcgcctgcgcttcgtcgcgaccatcgaagcgtgtgtgaaagacgccgacttcatccaggaaagcgccccggagcgcctggagctgaagctcgacctgcacagcaagatcagcgcagcagccaagccgaatgcgttgatcggttcaagcacctcgggcctgttgccgagtgagttctacgaaggttcgacccacccggaacgctgtgtggtcggccatccgttcaacccggtttacctgttgccgctggtggaggtcgtcggcggcaagaacaccgcgccagaagccatccaggctgcgatcaaggtgtatgaatccctcggcatgcgcccgctgcatgtgcgcaaggaagtgcctggctttatcgccgaccgcctgctggaagcgctgtggcgtgaagcacttcacttggtcaatgacggcgtcgctaccaccggcgaaatcgacgatgcaattcgcttcggcgctggcctgcgctggtcgttcatgggcacgttcctcacctataccctggcgggtggcgatgccggcatgcggcacttcatggcgcagttcggcccggcattgcaattgccgtggacctacctgccggcgccggaactgaccgacaagctgatcgacgatgtggtcgacggcaccagcgatcagttgggcaagcacagcatttcggcgctggaacgctatcgtgatgattgcctgctggcggtgctggaagcggtgaaaaccaccaaggccaagcacggcatgaccttcgctgaataacggaaaccccgacatgcccgcactcaccacctacaccacccaggtccaccccgactgggtggactacaacggccacctgcgcgacgcgttctacctgctgatcttcagctacgccaccgacgcgctgatggacaccctcgggctggacagtgaaaaccgcgaagccagcggccattcgctgttcactctggagttgcacctgaactacctgcacgaagtgaaactcggcgccgacgtggaggtgcatacccagctgatcgcccatgacgccaagcgcctgcacctctatcacagcctgcacctggtgggggatgagaaggaactggcgggcaacgaacagatgctgttgcacgtggacctggccggcccgcacgccgcgccgttcaccgagaccacactggaaagactcactgccatcagcgccgagcaggctgacctgccgcgccctgccctgctcggccgagtgattggactgccacccaaaaaacgataaggagccaccatgcaaaccgccgccgctgttgccgatttccgtacctacccgaagatctgcgacctcgcgcaggtgcgggtgctggatgatcagattcgtgtgcaatgggccgatgggcggaccagcccgtttcatcatcagtggctgcgggacaactgcccgtgcaccgagtgcgtgtacagcgtcacccgcgagcaggtgctggagattgtcgatgtggacgagcacctcagtgctgtcgacgctcgcatcgagcaaggcttgctgagcgtgcaatggcgcggtggccaccgcagccagtacgatcccggctggctgcgggcgcatgcctacgacgatgagtcgcgtgccgaacgccaggcggcgaaacccaaatcccagctgtgggacaaccgcttccagctaccggttttcgactattcagcagtcatggaagacccgcacgcattgttgcagtggctgctggcgctacgcgattgcggcctcactcaaatccgcggcgtccccaccgagcccggcgccctggcgctggtcgccaagcgcatttcattcatccgcgagagcaacttcggcgtgctgttcaacgtgcaatccaaggccgatgccgacagcaatgcctacaccgccttcaacctgccgttgcacagtgacttgcccacgcgggagctgcaaccgggcctgcagtttttgcattgcctggtgaacgatgccgacggtggcgaaagtatttttgtcgatgggtttgccatcgcctgcgccctgcgtaccgaagaccccgaagcgttcctggcgctgtgcgacatcccggtggagtttcgcaacaaggaccgttacagcgactaccgccagttggcgccgatcattgcgctggatgccttgggcgatatagctgagatccgcatggccaactttctacgcgggccatttgagaccagtgaggaccagatgccgttgctgtatcacgcctatcgacgctttatcgccatgacccgggaagatcgctttcgtgtggtgcagcgcctgaacccaggcgagctgtggtgcttcgataaccgccgcaccttgcatgcgcgcaacgccttcgaccctgcttccggtgcgcggcacttccaggggtgctacatcgaccgggatgagttgctctcaagaatccgggtgttgcagcgataacattggactgattgcgctaggttacctagcgctcctcaactggcaaatttgcggcctcaagggcctctttcttttctacagcggctgcaatgagaggcgccatctcacgcagcatttctaaatcgccactcttctcataaaggctcagccatttgcgtcgaggcctcataatccgttcatcatccctgatggggagtttcttgagcgtattttccgcgcgctctcggaactcggctggaacagcatccgttaacaccaactgaagagatggcagactgatttcgaaccatccttcctgcacttcaaatgggtccaacaatccagcagccacttgcttgcttttagagctgttaatccatccgtcaatgtatcgatagttcgaccattcgtaagcaagcaatcgatcctcgttgtaactgacaccatgatcgacagtaccactggggatatacatcgcggcataaccacaccggtcataaaacccgtccgccagcgcatgcctgaagggtgaccacaagtctcttggtctctcggcagtcgggttttccttaagccaaacaccacccggttttcgacatttttcatcaaacttatctggctccgggataggattcgacacaggcgtcattattttttccctttcgttgctttttcaggtttgccctgagaaacgacccagcgtggccaaaagtcatcaagacctggtaaaacccgaaccaactcttgatgaatagctgacttcgtactcaacttttctggcagctgttccttatcaccacgcatccatgcctcggcggcttcgattgcgtcttctgcggcaactgaacgggcctgttgcaaaccaaaaacatccgagactagccagttcacgacatcgccttgcttggaccacacctctttagtgaccttggcttctccagcctcaaggtgaatgttgaaaacggcatctttctcttcaataaactcaggctcggccgaggccaataccagtggggagtgggtcgctacgatcagctgcactgcaactttttcttgcgtcatctcctctaccactttcaaaagagcaggcacgatccgacgctgccattgaggatgcaaatggcattcgacttcgtcgatcaggaaaataatttctttggcagggttaacttttcgctgcttgcaggcgcgcttatggccattccaagtccagacaatcatgtaggccagcgcagcaattcgacgcattcccgcagaggcatgaaccagtgggacgtcaaggccataggacatgcgcaatgttggatattcggtctcgtccagagggcctatatggcagggctcgcccggcgacaacttctcaatgcccgatggcgacaatgcatccaatgcgactgttaactctttgaaagaagggtctcccgccgttcgctgccaacgaacccagtcatgaattaaaccattacatatatttgttcccttttccgaaattgcccctttccatacctcatcgggagaaaagttaaacgctcgaattttctcttcagttccagcctgctgatccgtccaatagttacgcgcagggtcccaagcagaaaaactgccatccaccccagcataaataacaattcccgggatggatggtcgagccttaggctggcgccaaaaaccgtctttgaaatgaacctcaccttccttgtctccagccgtcaccttgctgaacgcaaaaccaatactagccgcattggaggattctctaggaatcgcctctgctccacgtgcccaagtgcgcgtcaaagcccaccaggcagcatccagcagaaagcttttgccgaggccattgtcacccgtgatgaagttgagacgaggcgcaaactcaaccggcccaaacttttcagcagggccgacacctttgagagacaggagctttagcattgcattaccttttgatttgcctgagagcgtgggctaggttggacgccaacaacgctggtaaagcccacccgtgtaagtaaacagcatataggcattccgggcatttgagctgcggcaatgctaatgccaaacaataacgactagctatcccctattcatcccacccttctagaaacggggcgcccaaaacaaaaaagccccgatcaagccgtgacaagatcggggcatagcgctttgtgtgagccttgcatcccgagggtgaccaaaccttcaaggtgcgtgctggtgttcagtgtgcccattactgctatcggtatatgacccgaaaacgacctgctcatagccatctgagccattcgtggattctgcccttgccgaccggtcggaggcctaccagaatcccaatcaagccccgttccctacaccaggataaacgtcatgatgcatgcggatttgattgaccaggatgacctgctgggccaactgcgctcgctgggtttcgaagtctccagcggcgccaccgccgagcaggcctgcgagtgcgcggtgcgtggtttgagcgaggcgcgggccaaggcgctcaagggcatggtggagcagatgtacaccggcagtgcaacgattctgccggccgtgcgccaggcgatcgataagcagctgttgccggcactggtgcagttcaagcagaactcccgcgcctgatcgattcctatcgggggcaagctccctcccacctttgactgtgttcacccatccaaatgtgggagggggcttgcccccgatacagacacctcggtctagagccgcacgctggcaaacgtcgactcgttgcgcgcctggctcaacgccgacatcggccccgacaacggtgacaacaccagcgcctgcggaatcggcatcatcgccacctgctgggtggtgttggagccgacgcgctcatctcttggcggaatgccgaagtattcgcggtagcacttggagaaatgcggcgtggacacaaacccgcacaccgacgccacttcgatgatcgacatcggcgtttgcttgagcagctgccgtgcacggatcaggcgcagcttgaggtagtaacgcgacggcgagcagtgcaggtacttctggaacaaccgctccaactggcgacgggagacggcgacgtacaccgccagctcatccaggtcgatcggctcttccaggttggcttccatcaacgccacgatttcctgcagcttcggctggttggtgccgagcatgtgcttgagcggcacgcgctggtggtcttgctcgttgcggatgcgctcgtacacaaacatctcggagatggcggccgacagttcgcgaccgtgatcgcggctgatcaggtgcagcatcatgtccagcggcgcggtgccgccggagctggtgaagcggttacggtcgagggtgaacaggcgagtgctcatggccacgcgggggaaggcttcctgcatagaggccaggcattcccagtgcacgctgcaatcaaaaccgtcgagcagaccggcacaggccagggcccaactgccggtgcataccgcgcccaagcggcgcgattggcgtgcctggctttgcagccacgacacgtgttcacgagtcacggtacgctggatacctacgccaccgcacacgatcacggtgtccagggccggggctttgtgcatggaagcatcgggagtgatttgcagaccgtcgctggcccacacctggtttccgtcgacgctcaaggtcgtccagcgatacagctcgcggccggagagctggttggccatgcgcagcggttcgactgcggaggccagggaaatcagcgtgaaattgtccagcagcaaaaagccgatggattgaggcgcacggttctggggttgggccccggagttgaacgacgtcatcgcggtatctcctcacacaaagcgggtgatggcctcaggcgaggctcttgttattgcgctcttcatccggcgaggagagaggctttgaattgatagagcaaatgccatgcctaaatttgaatggccgtccaataactcctaaaaacgacctcatgacgcgtctaaacaagcccgcgcagcaagtatggttatggctggaattggccgtaggaacatgcccggacaaggtgtgtgagcagatcggtagcacttgtgggaaggcgctttgcgggcgtgggagaagtctgtcacccaacgcgcgggagaccggtggtcaggtcggaaatcgttcgcaagctacttatctatttgcgacgcgctaaaaggtggcgcttttggttggggtgttcactttttgcgcagcggcgcctggatgattgctatcgggggcgagccccctcccacctttgactgtgttcaccaatccaaatgtgggagggggcttgcccccgatgcaggcaacgcggtctcagcactccacggcgctgaccgccaacccaccacgcgaggtctctttgtacttgtcatgcatgtccgccccggtatcgcgcatagtgcggatcacccggtccagggagataaagtgctggccgtcgccgcgcagcgccatttgcgccgcgttgatcgctttcaccgccgcgattgcgttgcgctcgatgcacggcacttgcaccagcccgcccaccgggtcgcaggtcaggcccaggttgtgttccaggccgatctcggcggcgttgcacagttgttccggcgtggcgccgaggatctcggccagcccggcggcggccatggcgcaggcagaaccgacttcaccctggcagccgacttcggcgccggagatcgaggcgttcttcttgcacagaatgcccaccgccgccgcaccgagcaggtagtcgaccacattggcttcggtgacttcctcgctgaacttcatgaagtagtgcagcaccgccgggatgatcccagccgcgccgttggtgggtgcggtgaccatgcgtccaccggcggcgttttcttcgttcaccgccagggcgaacaggttgacccattccatggcactcagggtcgaaccgatcacattcggcttgttcaactcctgcaggctgcggtgcagcttggcggcacgccgacgcacgttgaggccaccgggcaggatgccttcgtgcttgaggccttgctcaacgcaatcctgcatggcacgccagagcttcataaggccgctgcggatttcatcttcagaacgccagaccttctcgttggccatcatcaactcggccacgcgcaggttgtgggtcttgcacagctgcaacagctccaccgcgctggaaaaatcgtaaggcaactcggtgcggtccatgtcggccacgccgctttgcgcctgggcttcatccactacgaaaccgccgcccaccgagtagtaagtgtcgcggtgcagctcgccgttgtcacccgacaccaccagggtcatggcgttgggatggaacggcaggttttcgtcgagcaggcgcatgtccctggcccagacaaagggcaccggcaagcgcccatcgagcagcaaggtgtcggtctcgcgcagggtgtgaatgcgcaggccgatttgcgacggatcgatagcgtcaggccattcgcccatcaggcccatgatggtcgctgtatcgctgccgtggccgatgccggtggccgacagcgagccatacagctgaacttcgacgcgccgcacctgttccaacacttcacgttcacgcaagccttgaacgaacaacgccgcggcgcgcatggggccgacggtgtgagaactcgaaggcccgatgccgatcttgaacaggtcgaaaacactgatagccattgccgtagaactcctcgataagcacgggccaggcttgaacgagctgctacgctcagatcgcccagatggcggcatcatcaagcttttgtttgccgtcacggcgtctcacaccgacgcacccatgctcaccagcgtcgcgtctgtgcgatcaccggttttggccgtttttagcggtgcagatgggcaaaaactgcagttttgccttgggaaaaacctgtaagcgacgtcaccgacactggatacgaccctccctgtactggatacgacgccccctgtaggcgtcagattttcactggtacatgatcagtctcgactcgtttgcaaggcaccgtgccagagctgttgtcgcacgctccaaccgcaacacttataaagcgcggcgaacgccgccagaaaaaacacaggagtctagccccatgaaagcttcaccctcgttgttgttggccgccatgctgagtctgccagtcctggcgcacgctgcagaaccggcacaatgtcagaccgtcaacttctccgatgtcggctggaccgacatcaccgtcaccaccgcgaccaccagcgaaatcctcaagggcctgggctacaagccgcgcaccacgatgatttcggtgccggtgacctacaagtccctggccgacggcaagaacatggacatcttcctcggcaactggatgccgaccatggaaaacgacatcaagccgtaccgtgatgccggcaccgtggagaccgtgcgtgccaacctggagaacgccaagtacaccctggcggtcccggaagcgctgtacaacaaaggcctgaaggacttcgccgatatcgccaaattcaaggatgaactgggcggcaagatctacggcatcgagccgggcaacgacggcaaccgcaccatccagacgctgatcgacaaagacgccttcggcctgaaaaccgccggcttcaaagtcgtcgagtccagcgaagccggcatgctctcccaggtcgaacgcgccaccaagcgcgaccaggccatcgtgttcctcggttgggaaccgcacccgatgaacacccgcttcaagatgaagtacctgaccgggggtgatgattccttcggccccaactacggccaggccaccatctacaccaacacccgcaagggctacacccaggaatgcagcaacgtgggccagttgctgaagaacctggtgttcaccctgaacatggaaagcaccctgatgggtaatgtcctggacgacaagatgaaacccgacgccgcggcgaaagcttggctgaagaagaacccgcaagtactcgacacttggctcgccggcgtcaccaccgttgatggcaaacctggcctggacgccgtgaaagcttacctctccaagtaatgccgctgaccccggggcggtgcgctgccccgggatgttttccctcttcgcatgtggacattcactaccatgctgactgaacagaaaatcccactaggccagtacatcgctgccttcgtcgaatggttgacccaacacggcgccaactacttcgacgcaatcgcatcgaccctggaaacgatgatccacggcgtgacgtttgcgctgacctggttcaatccgctggcattgatcggtctgattgcgctgctggctcactttattcaacgtaaatgggggctgactgtgtttgtcatcgcctccttcctgctgatcctcaacctgggttactggcaggaaaccatggagaccctggcgcaagtgctgttcgccaccctggtctgcgtggtcatcggtgtgccgctgggcattgttgccgcgcacaaaccgttgttctacaccatgatgcggccggtgctcgatctgatgcagaccgtaccgaccttcgtctacctcatccctaccctgaccctcttcgggctgggtgtggtgcctgggctgatttccacggtggtgttcgcgattgccgcgccgatccgcctgacctacctgggtatccgtgatgtaccgcaagagttgatggacgccggcaaggcctttggctgctcgcgccgtcagctgctctcgcgcatcgaactgccccacgccatgccgagcattgccgccggcattacccaatgcatcatgctgtcgctgtcgatggtggtgatcgcggccctggtgggcgccgacggcctcggcaaaccggtggtcaacgcactcaacaccgccgacatcgccctgggctttgaagccggcctggcaattgtcttgctggccatcatgctcgaccgcatctgcaaacaacccgacgctaaagtagggggtgatgcatgagcattatccgattcgacaaagtcgacgtgatcttctccaaagacccacgcgaagcgctcaagctgctggaccagggcatgagccgtaacgagatcctgaaaaagaccgggcagattgtcggcgtggaaaaagccagcctggatatcgagaaaggcgaaatctgcgtgctgatgggcctgtcgggttccggcaaatcgagcctgttgcgctgcatcaacggcctcaacaccgtgagccgtggccagctgttcgtggagcatgaaggtcgccagatcgacatcgcatcctgcacccccgccgagctgaaaatgatgcgcaccaagcgcatcgccatggtgttccagaagttcgccctgatgccttggctgacggtgcgcgaaaacatcagcttcggcctggagatgcagggccgcccggagaaagaccgccgcaaactggtggatgagaaactcgagctggtgggtctgacccagtggcgcaacaagaagccggacgaactctccggcggcatgcagcagcgcgtcggcctggcccgagcgctggcgatggacgccgatatcctgctgatggacgaacccttctccgccctcgacccactgatccgccagggcctgcaggacgagttgctggaactgcaacgcaagctgagcaagaccatcgtgttcgtgagccacgacctcgatgaagcgctcaagctgggcagccgtatcgcgatcatgaaagacggcaagatcatccagtacagcgtgccggaagagatcgtgctgaacccggcggacgactatgtgcgtaccttcgtagcccacaccaacccgctgaacgtgctgtgcggccgcagcctgatgcgcaccctggacaactgcaagcgcgtcaacggttcggtatgcctggacccgggcggcgactcgtggctggacctggccgaaggcaacaccatcaagggcgctcgccagaatggcgcggtgatgaacctgcagaactgggcaccggggcaagcggtggaaggcctgggccggctaccgacactggtggactcgaacatcggcatgcgcgacgctttgcagattcgttatcacaccgggaacaagctggtgttgcatgacaacaatcaggtggtggggattctcggagacagtgagctgtaccacgccctgctcggcaagaacctgggctaacactgcacatatcactgtagaaacggggtcaatgtgggagggggcttgcccccgatagcagtggatcagtaataaatatactgactgacatactgcaatcgggggcaagccccctcccacatttaaagcactaccaggcttcagctatagacccggccaaggagttgccgatggctttcaaactgatcgagcacgtcccgggtgatctgttcctgggcgaagcccatcaggtcgtattcctgaggcccgttgtgcaggtacacctcggcacggtagtagcgagtgcgctcttcctcgggcaggtcactcggcgccgacgagtaggcatccaggctcacttcatagacaaacgggttgccctcttccatctcgatgcgtacaccgatgcagcgcttggacttgccgagcaaggtctgcacttccaagccctgatcacgcaacgccgtcgccgcctcttccaacgccggcgtcacatgcttgtccatgaaacgctgcacggtgccttggctcggttgcaggtccagcgccgtcagacgctcgctgaaaccacggcgaccacgctcggccaattgcgcctgctcctgttcgatggccacgtcctggcgcatcgccttgtgcaagccgaacataaagaagatcagcaccaccgagaacggcagccccgccagcaccaccatggtttgcatggcttcgaagttgccggcgaacagcaggccgatggtcaccagggtgatcaccgccgaccagaagatccgcagccagtgcggcgcatcttcgtcaacattgccgcctttgcacgacaggttggccatcatcaccgcaccggaatccgccggggtcaggaacagcacgaagccgacgaagatcgatacgccgatgacgattttcgacgccgggtaatgctccagcagttgatagatggccatcgacggctgttccagtgcggtcttgcccaactccaccgcaccgtggttcagcaccaggtccagcgccgagttaccgaagatcgacaaccacgccagggtaaagcccaacgggatcagcagcacgccggccaccagttcgcgcaccgtgcgaccacgggaaatccgcgcaatgaacatgcccacgaatggcgcccaggaaatccaccacgcccagtagaacagggtccacaggcccatccaacgttcggtcttgtcggcgtcgccttcgtacacgtacaggtcgaaggttttcaggatgatgccgttgaggtagtccccggtgttctgcaccaggccgttgagcaaatgcagggtcgggccgaacaacagcacgaaaatcaacaggccgctgaacagcacgatgttgaggttggacagacgacgaatgccgttctccacgcccgacacggcggcgatggtcgccacggtgctcatcacgatgatcacgatcaacaggttggtgttgctgtgctgcatgccgaacaggttttccaacccggacgacacctgcatcgaaccgatccccaggttcgtcaccaggcccagcagggtcacgaacatgccgaaaccgtctaccgcatggccggccgcgcctttcacccaacgctcgcccaccagcgggtacagcgccgaacgcagggccagcggctggttatgccgatacgcgaagtacgccacggccaggccgaccagggcatagatcgcccagccgtgcaggccccaatgcaggaaggtcagttgcagcgcctggcgggcggcgccattgctggcggctgcgccttcgggcgggttgaagtaatggtccagcggctcggaagcaccgaagtacagcagcgagatgccgatacccgacgagaacagcatgccggcccaggcgccgtagctgaagtccggggtgtcgtccttgctgcccagtttcaacttgccgtaggacgaaaacgccaggcccaccacaaacaccaggtaggcggcgatgaccaccatgtagtaccagccgaagcttttcgatagccacgcctgggcaacaccgagcatgcgcccggcctcctgcggggcgatgatcagaatggcggtcaacaacagaatcagcgcggtggaggtgtagaacacccaaccgttgacccgcaccttttccggtggggtttttataagagaggcagaactcatggcgcagatgctccgggcagtgcgagagagaaacacaaggcaacggttatcccgggacatcgatttttcggcagtcgacggacgggtgttataaagacaccccgaaaattcttgaaccccgccgaagcggtgtacaagccctgatacggcctgtttcaaggatttttgcaggtgtcagatgtcgcggctcccaggtaggaaatatctgtaggcagcgaccatttgtcgcagatcttattctttgttgattgaacgttcaatcaaaacaaaatagactggccatcaagccgacggacgtttatcgcccgccgcaggcctaaggagaggtgctacatgcccaaggtcggtatgcaacccatacgccgccagcaattgatcgaagccacgttgacggccatcgatcaggtcggaatgggagatgccagcattgcgctgatcgcccgtttggccggcgtctcgaacggcatcatcagtcactacttcaaggacaagaacggccttattgcagcgacgatgcgctacttgatgaacgcgctgatcgacaacgtccacgaacgccgacaggcgctcacggacgacagcccacgggcgcacctgcaggtgatcatcgagggcaacttcgacgccagccaggtcaacggaccggcaatgaaaacctggctggccttctgggccaccagcatgcaccacccgtcattgcacaggttgcagcggatcaacgatcaacgtctgtattccaacctgtgctgccagttccgccgagtgctgccgctgccgcacgcacgcaaagcagcccgcggcctggcggccctgatcgacggtttgtggttgcgcggcgccctgtcgggagacgctttcgacacggcgcaggcgcaacggatcgcttacgaatacatggatttccaattggccaagcaggtgagttagagcacacataaaccgctcaacccctgaacgtctgccgctcagtgttgccacaccttcatggcccaccgacggcgggtaacgccaaccacttatgcacttgcgaggactttatggcccgtttcgacctgcaaaaactctacattgacggcggctacagcgacgctggcagcgatgccaccttcgaagccatcaacccggctaacggtgaagttctcgcccaagtgcaacgcgcaacgaaagaagacgttgaacgtgccgtggtcagcgccgaaaaaggccagaaaatctgggccgcgatgaccgccatggagcgttcgcgcatcctgcgtcgtgccgtcgacatcctgcgcgaacgcaacgacgagctggccgccctggaaaccctggacaccggtaaagccttctccgaaaccaagtacgtcgacatcgtcaccggcgccgacgtgctggaatactacgcaggcctggtgccggccatcgaaggcgagcagatcccgctgcgcgacacctcgttcgtctacacccgccgcgagccgctgggcgtggtcgccggtatcggcgcgtggaactacccgatccagatcgccctgtggaaatccgcaccggccctggccgccggtaacgcaatgatcttcaagccaagcgaagtcacctcgctgaccaccctgaaactggccgagatctacaccgaagccggcgttccagcgggcgtgttcaacgtgctgaccggcagcggtcgtgaagtcggcacctggctgaccgagcacccacgcatcgagaaagtctcgttcaccggcggcaccgacaccggcaagaaggtcatggccagcgcttcgagctcctcgctcaaggaagtgaccatggaactgggcggcaagtcgccgctgatcgtgttcgaagacgccgacctggatcgtgccgccgacatcgcgatgatggccaacttctacagctccggccaggtctgcaccaacggcactcgcgtgttcgtacccaagcacctgcaagccgtgttcgaagccaagatcgtcgagcgtgtggcgcgcatccgcgttggcaacccgcaggacgacaccaccaacttcggcccgctggtcagcttcgcccacatggaaagcgtgctgggctacatcgccaaaggtaaggaagaaggcgcacgcgtactgtgcggcggcgaccgcctgaccgacggcgacttcgccaaaggcgcctttgttgccccaaccgtgttcaccgactgcaccgacgagatgaccatcgtccgtgaagaaatcttcggcccagtgatgagcatcctcacttacgagaccgaagaagaagtgatccgtcgcgccaacgacaccgacttcggcctggccgccggcctggtgaccaaggacctgaaccgcgcccaccgcgtgattcaccaattggaagcgggtatctgctggatcaacgcctggggcgaatccgacgcgaagatgccggtcggtggctacaagcaatcgggtgttggccgtgagaacggcatcagctcgctgaacaacttcacccgcatcaaatcggtacaggttgagctgggcgactacgcctcggtgttctaagagccgggatttgtattgcctgtgaggccgccatcgggggcaagccccctcccacactttgatttgcgaatacattcaaaaatgtgggagggggcttgcccccgatgaggcccgacctgaccacacatcaaagagggtgcatccaatgtcccaagaatacgattacatcattgtgggtgccggctccgccggtaacaccctggcgacccgtctgaccgaagacgaaggcgtcaccgtcctgctgctggaagccggcggcccggactaccgtttcgacttccgtacccagatgccagccgccctggcgttcccgctgcaaggccgccgctacaactgggcctacgagaccgatccagagccgcacatggacggccgccgcatggaatgcggtcgcggcaagggcctgggcggttcctcgctgatcaacggcatgtgctacatccgcggcaacgccatggactacgacaattggtcgaagctgccaggcctggaagactggacctacctcgactgcctgccgtatttccgcaaggccgaaacccgcgacatcggccccaacgactggcacggcggcgatggcccggtcagcgtgaccacgcctaaagccggcaacaacccgctgttccacgccatggtcgaagccggcgtgcaggccggttacccgcgtaccgaagacttgaacggctaccagcaggaaggcttcggcccgatggaccgtaccgtcacgccgaacggccgtcgcgccagtaccgcacgcggttacctggacaccgccaagaagcgttcgaccctgaccatcgtcacccatgccctcaccgacaaagtgttgtttgaaggcaagcgtgccgttggcgtgcgttacctgatcggtgccgccgaagagcgtgttgaagcccgcgcccgtaaggaagtgctggtgtgcagcggcgcaattgcttcgccgcaactgctgcaacgctccggtgtcggcccggccaaactgctggaaagcctcgacatcccggtggtccacgacctgccgggcgtcggcgaaaacctgcaggaccaccttgagctgtacctgcaatacgcctgcacccaaccggtgtcgctgtacccgtcgctgctctggtacaaccaaccggccattggtgccgagtggctgttcaacggcaccggcatcggcgccagcaaccagttcgaagcgggcgggtttatccgcacccgtgaagagttcgaatggccgaacatccagtaccacttcctgccggtcgcgattaactacaacggcagcaacggcgtaaaagagcacggcttccaggcacacatgggctccatgcgctcgccaagccgtggccgcgtccagctgaagtcgaagaacccacgggactacccgagcatcctcttcaactacatggccaccgagcaggactggcaggaattccgcgacggcatccgcctgacccgtgaaatcatgcagcagccggcgctggacccctatcgtggccgcgaaatcagcccgggtatcgatgtgcaaaccgatgagcaactggacaagttcatccgtgagcacgccgaaaccgcgttccacccgtcctgctcgtgcaagatgggcaccgacgaaatggcagtagtcgatggcgaaggccgcgtgcatggcatgcagggtctgcgtgtagtcgatgcgtcgatcatgccgatcatcaccaccggcaacctgaacgcgccgacgatcatgatcgccgagaaaatcgccgacaagatccgtggccgccagccattgccgcgcagcaccgccgactactacgtggcaggcgacgcgccggtgcggggcaagccgctgcgtgaagtgggccctaccgcgcagtaacggatacaccgcggtgttcccatcggaggcaagccccctcccacatttttgaccgtgtgaacccgatcaagtgtgggagggggcttgcccccgaagaggcccgaccagtcactgcaaaacccctccttgatcagctactctgtctgcctgcccgcgacgagccgcccacaaggaaggccccatgttcgatcaccacgccacactcaaacagcatttcagtgccctgcgcacccgtgccgaattcttttcgctgcgttatgtacgcgaatccggccaatacctggccgtacgcaagaacgtcgccgaaccgccgcacctgagccacgacgagggcgccatgctcaccgtgcgtctcaacggcgtggaagcctacgccgcgaccaacgatatttccctggccggcctgcaagccgcccttgagcgtgccgaacagcaagcccggcaaatcttgccccacgccctgctcgacctgcgcgagcaacacgtctccagtgacgtcgccgattacctgtcgcccaaccttcaacagcccttcccatccctgagcgattgctaccagttactcggcagcgaatcggcctccgtgccgaaggacgagcgcctggtgagctgggaagtcagcctgggcctgacccacgtcgagcagatctacctgaacaatgccggtgccgagttgcgccaggcccagcgctttgtgttccccggcgtcaacgtcaccgcctacgatggcaatgacagccagacccgcaccctcggcggcagcaacttcggccagcaaggcgggttcgacgtaatcagccgcttcggcctggtcggtgccgcgccacgcatcgccgacgaggccctgcaactgctggccgcgccgaacacgcccagcggcccgcgtgacctgctgctgatgcccgatcagatgatcctgcagatccacgagtccatcggccacccgctggagttggaccgcatcctcggcgacgagcgcaattacgccggcaccagttttgtgaaggccagcgacttcggccacctgcaatatggctccccgctgctgaacgtgaccttcgacccggacattcccgagcagctcgccagctacggccacgacgacgaaggcaccaaagccagcaaacagttcctgatccgtgaggggctgctgctcaaaccgctcggtggcgcgctgtcgcaattccgtgcgggcatgcaaggcgtggccaacagccgggccagcagctggaaccgcgcgcccatcgatcgcatggccaacttgaatatcgaagcgggcgacaagagcctcgcgcaactgatcggcggtatcgaaaacggcatcctgatgtcgactaaccgctcgtggtccatcgacgatgcgcgcaataaattccagttcggctgcgaatggggccaactgatcgaaaatggcgagttgaaaggcgtggtgaaaaaccccaactaccgggccatttccgcgaacttctggcgcaacctcagcgcggtcggcgatgccagtacgttcaaggtgctgggcacgccgaactgcggcaaaggtgaacccaaccaggtgattcgcgtcggccatgcctcgccggcctgcgtattcagcgatgtcgacgtatttgggggagatgcctgatgaacaacttcaaggcactggtggagtggctcaaacaggccatcaccgacaacgaacaattccacctgggctatgcggatgaagcgtccgagttcgtgcgcttcaaccacgccaaggtgcgccaggccggccaggtgcaacaagccagcctcagcctgaaactgatcaacaatggccgccatgccgacctgggcatcaccttgtccggcgcagcggaactggaccgccaacgtttggccgacggcctgcaacaactgcgcgacaccttgccgttgctacccaaggacccgtacctgctgctgaaccacaacgcctggcaaagcaacaacgaacaaacgcgaccgctgccggacctggcccgggtgttggaagacatcagccaggcggctgagggcgttgatttggtcgggttctacgcttccggcccgatcagccgtggctttgccagctcggacggcgcgttcggctggcaccgcgccaacagcttcaacttcgatttcagcctgttccacgccaatggcgaagcggtcaaggccagctacgccgggcacacctgggacagcgccgagttcgccgcgcgcttccagcaagcccgcgagcaattggaattcctcggccgcccgctgcataagctggcacccgggcagtaccgcgcctacctcgccccggcggcgctggaagaaatcatcagtctcatcacctggggtggtttttccgcccaggccatcgccagcaaaggcagctcgctgcaaaagctgtatgccggtgaacaatccctgagcccgctggtgaccgtcgacgaacagatcagcggctccctgagccaggcgttctccaccgaaggctacccgcgcggcgacgtcacgttgatcaacgcgggcaaaggcgcaggccagttgatcaactcgcgcagcgccgccgaatatggcctgagcaccaacggcgccagcagcgacgagtcccccagcgccttgcagatggccgccggcgacctggcccaggccgatatcctcaagcaattgggcaccgggttgtacatcagcaacctgtggtatttgaactactccgacctgccggcggcgcgcctgaccggcatgacacgcttcgccacgttctgggtggaagacggcgaaatcaaggcaccggtcagcaccatgcgctttgatgacagcgtgtacaacctgctgggtacgcagttggaagccctgaccgctgagcgggaactgctgctctcggccagcacgtacagccagcgcaacacggcctccaacctgttgccgggtgccttggtcaaacgcctgaccctcaccctctaaacacagcagttcccctgtgggagggggcttgctcccgatagcggtgtatcagccaagtattcatcagctgacacgctgcaatcgggggcaagccccctcccacattgagttgtgctgagttcagacatctctgtttcgccccttcctacggttaattcttgtcttccccacctgcacgggcagcctgttgtcgcctgcaaaaaacctcgttataagggttagtggcaccccgccaccccacccacgagagcatgaccttgcccgggaagggcaagctggagcgttgacatgaaccatggaagttttgtcatagaaaagctgttcaagcactacaacgttcatgttgagcagctaggaaacgattcggaaaaaaagaccgtcctgatggtcaacggcgcgctgtccaccacgcgctccttcgcccgcaccagcaaatgcctggccgagcatttcaatgtgctgctgttcgacttgccgttctccggttattcccgcgaacacaataccgacctggacctggtcaccaaggatgacgaggtgcatatgctgcgcgccttggtcgagcgcttccaggtcaaccacctggtgtcagcctcctggggtggcatctcaaccctgctgaccctggcccacaacccgccgtccatcgaaagctcggtggtgatggccctggcgcccaacctcaaccaggccatgctcgactatgtggagcgcgtgcgcgtgttgatcgaagcggacgacaagtcggccgttggccacctgcttaacgagaccgtgggcaaatacctctcgccccggctcaagcgcaacaatcaccggcacctgtcgagcatggccaccaccgaataccgccaggcgcgttttcatatccaccaggtgctgggcttgggcgacggcaattacctgccagcactcaagcagattgaaacaccggtgcacttcctcaacggcgcgctcgacgaatacacccccgccgccgaggcgcaattgttcaagcagtacgtggggcgcagcagctttgccgtggccgaacacaccggccacttgcttgacctcgaatccaacgaagcggccaccgcggtacaccgtgaactgctggatttcctggtgggaaaaagcaccccggttggcgcataatcgccgacacatagccagctaacaaaaaggttctctatgcccaatcgcgtcccgctcgatgccaagaccgcccgctggctcccctgggtggtcgcgattgccttcttcatgcagtcgctggacgggacgatcctcaacacggcattgccggccatggcccgggacctcgcggaaaacccgctgcgcatgcaaggggtggtgatcgcctacatgctcaccgtcgccttgctcatcccggcctcaggctggattgccgaccgcttcggcaccaagaaaatcttctttggcgccatcatgctgttcagcattggttcgctgctatgcgccttgtccagcagcctgaccatgctggtcggtgcccgggtaatccagggcctgggcggtgcactgatgctgccggtcgggcgcttggtggtgctgcgcgcatatccgcgttccgaactggtgcgcatcatgggcttcattaccatccccggcctgctcggcccgctgctcggcccgaccatgggtggctggatggtgcaatacctgacctggcactggatcttcctgatcaacctgccggtgggcatggtcggctgttacgccgtgtggaagctgatccccgacctgcgcggcagcgaacgcacacgctttgatggcgtggggtttctattgtttggcgcggcgatggtgttgatcaccatcgccatggaaggcctgggcgaactgcacctgccgcacctgcgggtgatgttgctgctgttcggcgggctggcgtgcctggcggcgtactggctgcgcgccgggcatatcgacaacccgctgttttcaccggtgctgttcaagacccgcacctttgccgtgggtatcctcggcaacctgtttgcacgcttgggcagtggcgcgttgccgttcctggtgccgttgctgttgcaggtcgcgctgggctactcgccgtccgaagcgggtatgagcatgctgcccctggcggcggcggcgatgtttgccaagtcagtcgcgcgtacgctgatcgaacgcctgggctaccgcatcgtgctcaccggcaacaccctggcgctgggcatcatgctggcgagcatgggcctggtcagcgagcacacgccctacccgctgctgttgtgcatgctggcggtactgggggcgatcaattccctgcaatttaccgcgatgaacaccgtcaccctgatcgacctcgacgacgcccaggccagcagcggcaacagtttgctgtcggtggtggcgcagttgtccctcagcctcggcgtggcctgcgccggtgcgctgctcggcgggttcaccgccgaaaccggtaatgatggggtggaaagcgtactcggtgcgttccaactgaccttcctcaccgtgggcatcatggcgatgctggcggcggcgatcttcctgcaattgtcgccaaatgacggcaaacgagtagtcagccgcgagcacgacatcgagcattaacaggcttctcgtctagaacttgcagggaaattcccacgggactggtacactgcgcgacattttgttttgcagagccagtcccgtgactaccatcgccaccgcttttaatactttgcccctgtccgccgccatgctggctaacctcgactcgctgggttatgtcgagatgacgcagatccaggcgcaaagcttgccggtgatcctcaaggggctggacctgattgcccaggccaagaccggcagcggcaagaccgccgccttcggcatcggcctgttgaacccgatcaacccgcgctacttcggctgccaggccctggtcatgtgcccgacccgtgagctggccgaccaggtcgccaaggaaatccgccgcctggcccgtgccgaagacaacatcaaggtactgaccctgtgcggtggtgtgtccctcggcccgcagatcgcttccctggagcacggcgcccacgtcatcgtcggcacgccgggccgcatccagcagcacctgcgcaaaggttcgctggtgctggatggcttgaacacgctgatcctcgatgaagccgaccgcatgctcgacatgggcttctacgacgccatcgaagacatcatcagcaagaccccgccgcgccgccagaccctgctgttctccgccacctacccggtgagcatcaagcagctggcctcgaaattcatgcgcgcgccgcagcaagttaaagccgaagcattccactccgacgaccagatcgagcagcgtttctacgaaatctcgccggaagagcgcatggacgcggtgaccaaggtactggcgcatttccgcccagcgtcttgcgtggcgttctgctttaccaagcagcaagtgcaggaaaccgtggatcacctgacctccaagggcatttccgccgttggcctgcatggcgacctggaacagcgcgaccgcgaccaggtgctggcgatgttcgccaaccgcagcacctcggtgctggtggccactgacgttgcggcccgtggcctggacatcgactcgctggacatggtgatcaacgttgaactggcccgcgattcggagatccacatccaccgcgtcggccgtaccggccgtgccggtgagaccggcatcgccatcagcctggtcgccccgtccgaagcgcatcgcgcccaggccatcgagcaactgcagaagtcgccgctgaactgggaccaactggacaacctcaagccgcaaagcggtggcccattgctgccgcagatgagcaccctgtgcatcgctgccgggcgtaaagacaaggttcgaccgggcgatatcctcggcgcgttgaccggtgaagccggcatcccgggtgcccaggtcggcaagatcgcgatctttgacttccaggccttcgtggccgtggagcgcgggatcgccaagcaggccttgcagcgcttgaacgatggcaagatcaaaggccgttcgctgcgcgttcgaatcctgtaacacgatctccccttcaatggagatccaatgtgggagggggcttgcccccgatagcaatctatcagttaccgatgcgctgactgacacactgctatcgggggcaagccccctcccacatttgaatgtattccaactcagaacttgtatgaggacaccgttttgcgctcgaccgaagttgtgatcattggcgccggcgccgcaggcttgatgtgcgcgctgaccgccgccgggcgtgggcgcaaggtgatgttgatcgaccatgcgaacaaggccggcaagaagatcctgatgtccggcggtggccgctgcaacttcaccaatatgtacaccgagccggccaacttcctctcgcacaatgcgcacttttgcaagtccgccctggcccgctacacccagtgggacttcatcgcgctggtggccaagcacggtgtgccctaccacgagaagaaactcggccagctgttctgcgataacaaatccagcgacatcctcggcatgctgctcgatgagtgcattcaggtcggcgtaagcctgcacctggacacctcgatccaggaaattgccaggctggacagcggctatcagttgcagaccaccttgggcgagttgcgctgcgaatccctggtgattgccaccggcggcctgtcgatcccgaccctgggcgcgaccggctttggttaccaggtggccagacaattcggccacgaactgctgccgacccgcgccgggctggtgccgttcaccatcaccgaccagctcaaggacttgtgtggcgagttgtcgggtacgtcggtggattgcctggtcagctgcaacggccagagctttcgcgagaacatcctctttacccatcgtggcctcagcgggccggcgattttgcagatttcttcttactgggaatccggcgacacggttgaaatcaacctgctgcccgaccacgacgcccacacctggctgcaacagcaacaagccgagcgccccaacagcgaattgaaaaccctgctgggcgagatctttaccaagaagatggccaacctgctggccgagacgtggttcgcatccaagccgatgaagcagtacacccatgccgaaattgccgacatcgcacaaaaactcggcaattggcagttggtgccggcgggcaccgagggttatcgcacggccgaagtcacgctggggggcgtggacacgcgggaagtgtcgtccaagactatggaatcactgaaaagccctggcctgtactttatcggtgaagtgctggatgtaaccggtcacctgggcgggttcaacttccagtgggcgtgggcttcgggctatgcggccgcgcagtacgcctgaccgcaaaatgtactgagtaccaatgtgggagggggcttgcccccgatggcggtgcatcagtcaacgattgggtgactgacccactgctatcgggggcaagccccctcccacatggaataaattttcctgcccgatgtgatcaccacccttgccgtggcgtccttgatagctcaatttagcggcatcgtcccggaagactccagacttcatgtcatcgacctcgttcaagcagtccctgcggcgcctgtgggcactggataaattcagctacagcattcgggtattcatcgccctcaccggcagcatggcgctgtgctggtaccaggatgaaatgacactgctgatcccgctgttcctggggatcatcgccagcgccctggccgagaccgatgacagttggcaaggccgcctcaacgccctggcggtgacgctggtgtgtttcagcatcgccgcgctgtcggtggagttgctgttcccttatcccttgatcttcgcggtctccctggccctggccaccttctgcctgaccatgctcggtgccttgggcgagcgctatggcgcgatagcctcagcgacgctgatcctgtcggtatacaccatgatcggcgtggaccagcgcggcggcgccgtcagcgatttctggcacgagccgctgctgttggtggccggtgccgcctggtatggcgcgctgtcggtgctgtggcaggcgctgttttccaaccagccggtgcaacagagcctggcgcggctgttccgtgaactgggacggtacctcaagctcaaatcatcgttgttcgagccgatccgccagctggacgtggaagcgcggcgcctggaactggcccagcaaaatggtcgagtggtggcggcgctcaatgccgcgaaggaaatcatcctgcatcgcgtgggtaatggtcgccccggttcgaaagtcagtcgctacctgaagctgtatttcctggcccaggacatccacgaacgtgccagctcgtcgcactacccgtacaacgccctagccgaggccttcttccacagcgacgtgctgttccgctgccagcgcctgttgcgccagcaaggcaaggcctgccagaccctggccgagtcgatccagatgcgccagccgttcatctatgacgacagcttcgccgaagccctgggcgacctcaacgcgtccttggagcacctgcgcatccagagcaacccggcctggcgcggcctgctgcgctcgttgcgcgccctggcggccaacctgtcgaccctggaccgcctgctcggcgacgccagcaaccccgacagcctggcggacgccaccgacagcaacctgctggaccgcgccccgcgcaacctcaaggaaatgtggacgcgcctgcgcacgcagatgacgccgacgtcgctgctgttccgccatgcgttgcgtctgtcgctggcgttgaccgtcggctacggcatgctgcatgcaatccacgcgtcccaaggctactggatcatcctcaccacgctgttcgtgtgccagccgaactatggcgccacgcggcgcaagctcggccaacgcatcatcggcacggccatcggcttgaccgtggcctgggcactgttcgacctgttcccgagccccctggtgcaatcgatgttcgccatcgccgccggcctggtgttctttatcaaccgcaccacccgctacaccctggccaccgccgcgatcacgctgatggtgttgttctgcttcaaccaggtcggcgatggctacgggctgttcctgccacgtctgttcgataccttgctcggcagcctgatcgccggcctggcggtgttcctgttcctgccggactggcaaggccgccgcttgaacaaagtgctggccaacaccctgacctgcaacagcatctacctgcgccagatcatgcagcagtacgccgccggcaagagtgacgacctggcctaccgcctggcgcggcgcaacgcgcacaacgccgatgcggcgctgtccaccaccctggcgaatatgctgatggagccggggcatttccgtaaggaagcggatgtgggctttcgtttcctggtgttgtcgcacaccttgctcagttatttgtcaggactgggcgcgcatcgcgaaacccaattgccggccgaagtgcgtgaacatctgatcgatggcgccggcaagaccctggcggcgagcatcgatgaaatcgccacggggttggccaataagcagccgatcgcgatccagagcgatgccgaggaagcgctggcggcggacctggaacagatgccggatgagatcgatgaagggcagcggttggtgcagacgcagttggcgttgatttgccggcagctggggccgttgcgcacgttggcggcgcatctgatcaaggacaccagcgcggcttaggtcgctatcgggggcaagccccctcccacagttttgatttgtgaacacagtcaacaggtgggagggggcttgcccccgatgaggtccgcacaggcactacatgccatgggccttcatcagccgctcatagctgccgtcggccttcatcttggcaatctcccgatcaaagctggccacgatctgctcatgatcagggttcttcaggctgaccaggatgtgcaggctgttttcactcagcggctggggcaaaaactccaccgcattgcgcacccgtgccgattcacgcgagaggtaatagcgcgccacgtactcatcctccaccgtcaaccgcacccgctgcgccgcgagcatacgcacggccatggcgaagttgtgcaccgggactttctgcaactgcgcatccccatcgaacgccgccgaataggcatagccacgcaccacggcgatgggatagtcgtgcaattgcgcaaggttctggaattcgatgggatcgtcgcggcgcttgataaagcgcacacggttgagcaggtattcacctgagaattggcccagtttcgtacgggcatcgtcgtaccaggcgttgatcagcacgtcataacggccgtcgcccacccccatcagcgcacgggcccagggcacctgctcgaagtcactggcgtaacccgcacgggccagggcggtactgacgatgtcggtggccagcccgccattgatcaaggtggcatcggtaaagggcggccaggcatctgccaccagacgcagacgctgcgcgaatgccggctgggccagcagcaacactccaatcaaagcaacggcacgagagaatcgcggcatgctcaaagtccttggcaggcaggcggtggccttggctcaggcgcggcccgaggttctaacagtagctcagattacacaaagaaaccggtgccgaacgcactcaatgatggcaaattgatttcactcacaaaaatagttgatttagacagcgttgcccgctgcgcttactatccgcaacagacattgataagagaactcgccatgaccgttgaatgggtgtgcaaacaccacgatgacctgggcaaggagcagctttacgcgatcctgcgcttgcgcaacgaggtgtttgttgtcgagcagaaatgtgtgtaccaggatctcgatgggcaggatttgtcaggcgacacccatcacctgatggcgtggcaggacgaccaactggtggcttacctgcgcctgctggacccggaatcccagggcggcgacgtggtgatcggccgcgtgatcgtagcgccggtggcgcgcggcaccgggctggggcatcggatgatggaagagacgctcaagcagattgccgatatctggcctgagacaccgatgttcctgtcagcccaggcgcatttgcaggggtattacgggcggtatgggtttgtggtggcgggtgaggaataccttgaggatgatattccacacatcggcatgcgaaaggatcaggggtagcccagcacctgcttgatctggccgaggttcgcctcgatccaacgccgatcaatcgcgccccagctgcgaatccgatagtgcccggcatggttgcgggcaccgtcttcctgctcgaactcacacacaatatccagatcggacaatgccgcaatcgtgtcctgcgccgtgcgccggggcatgccggtggcgtcggtcagggccgggacgctgctggcctggccgctgtcgatcaggtaggccacgtacaggcggcggtagaagctgctcttggtcttgctcacatccatggtcggttgccttgtgcggtcagggtttgcccagcaggtcgcggtacgtgaggtacacccgcaggttgaattccacctgatggtagcccggcatcatgtactcgcagagtttgtagaacgccttgttgtggtccgattccttgaagtgcgccagttcgtggaccacgatcatgcgcaggaactgcggcgcggcctccttgaacagcgcagcaatgcggatctctttcttcgacttcagattgccgccctgcacccgcgagatggtggtgtgcaggccgagggcgcgatgagtcaggtccaggcgattatcgaacagcaccttgtcgatggccggcgcattgcgcaggtgttcctgcttcaaggccagcgcgtaggcgtacagggccttgtcgctctgcaccgcgtggcgttcggggtaacgttgctccaagtaggcacccaactgatccttggcgatcagctggcgcacttgctcctggagggcggcgggataggcctggaggtatttcagcgcggtcatgggctctgcaacagggttcggatggccgccagtgtagcgaattcagcgcaggcgagcgtggcaccagtgtgccacttcctcagccatcaacggctgcgccgccatcgggccctgaatgaatgggcaaccattggccttgagccattgggcctgctcctgggtttccaccccctcggccactaccactacatcaaaatgcttgcacaactcgataatgctgcgcgccatcacctcatcgcgcaccgagcccggcaggcgagcgaccaattgcgggtcaagcttgagggtatcgaaggccaggtcgcgcagatgcgccagggaacaattgcccaagccaaagtcatccagggcagtgcgcacgccgatctggcgcagcaacttgagctgcttgaccgactcatcaaggttgctcatcaggcagtcttcactgatttccacctccagttgccgcccctgcagcccatgtcgctcaagcacctgctgcagttggctcgccaggttgggcatgttgaactggttgctgctcaggctcacgctgagcaccagttcatcgtcgaagccggcgtgccaggcctggagttgggcgccgacttgttggtaaatccaggtgctgagctggctgatcagccgggcttcttccagcaatggcagaaacagaccgggcggcacatcgccgacactcgggtgctgccagcgcaatagcgcttccacaccgcgcacacgcccgtccgccaacgccacctgcggctggtacaccagggtgaactccttgttttgaatcgccgtgcgcacgctgtcttccagcatcaggcgcgaacgggcgcggccattcatttcctggtcgtaatagcgatattgctgacggcctgcgcgcttggcttcgtacatggcgatgtctgccgcgcgcaacagaccgttaatgtccgagccgcaatccgggaaggtggcgataccgatactgacaccgagcatcacatccaaaccttcaacttgctggcagatagacacccgttcgatcagtttttctgcaattttcgccgcctgctcggggaactccagctccagcaacgcggtgaactcatcgccgcccatgcgccccagaatgtcataggaacgcaggcagccctgcaactgctccgatacccagcgcagcacacggtcgccggcgtcatggccaagggaatcattgacccgcttgaagccgtcaaggtccaggtacagcagcaccagagactgctcgttgcgctcgctgcgcagcaaaatgttttcagccgcctggtaaaacccgcgccggttcaacagtccggtcagcgggtcggtgaccgcctggaactccaattgttgatgcaggtgacgcacttcggacatgtccagcacggtcaccaccatggccttctgttcggccggcagcggcgcgcacgacaacgccaccggcacctgctggccgcggctggtccgcaggatcgcatcgtgcaagcgccaggtctggccctggcggtaagcgaggaacatctcgaaccccagccaggccggtacatggggcttttgcaggaagctcaggaaactctcgcctcgcaactcggccagggtagcgttcaacagccgcgaaatggccgggttggcatactcgatcacgctgccctcgcccaccaccaggatgccttcggcggcgttgtccaacaccgaggcattgaacgcccgcgccgactccagctcatggctcaggcgctgcaaggcccggcgattgcgctgatgttccagcaacgcctggaccttgggtttgaggatgtgcgggtcgaacggtttgaacaggtagtcgatggcgccactggcatagccttcgagtactgcggccggcgactgggcgtgggccgtgaggaaaatgatcggtgtcatgcgcgtgcgctggctgccgcgcatcaggcgcgccacctcaaagccgtccatgccgggcatcttcacgtccagcagcaccaggtcgacttcatgtttgagtaacaactcgagggcttccacaccggacgcggcggtcaccacatgccagtcttcacgctgtaacagcgcacgcatgctaagcaggttctccgggtagtcatcgaccacaagcagaaccgaatgaccatcgccgtggtgtggagcgcattccatgctacgtctcttccttaggactactccggtcatttctgacagaaaacccggacaaacactgaggcctcactctagccccggttcagaaaaagcagaagtaacctcagtgccatcattgcgccaatcttcaggaagccgactaacggtcaaccgctacaagccacgaaccatgggaaacatggctttttggcattcctttggcgccaataaatcgccagcaatgatttaacaagatggttaacaccacctataaagaacctgtctggcccaagggccatagcctacacccctctgtaaaaaggcctacgccatgatcgacctatccacctggaacctcagcatccctgtcggctctccgcccgcgaccatcgaaaccccaagattgatgagcggcttcaacgaccaatatttccaggccgaaggcagcaacgtccaattctggaccccggtcaccggcacccgtaccgagaacgccatttacccgcgcagcgaactgcgcgagacctacgccgatgggcgcctgcgcaactggacctatccggatgcggacaacttcctgcgtgccaccctgtccgtcaaccaagtgccgtcctccggcaaaatcgtgatcgggcagatccacgcctatgacagccagaaaccgctgatcaagctggaatatcagttcaaggaaaagacccagaccggcaacatcgtcgccaaagtacgcatgcgcccggatgaggatgaagggcgcacgatcatcgtcgcctccaatgtgccgctggagaagagctttacctatgtgatcaacctcaacaaagccgggctgctcagtgtgtatgccgcggatggcgagtggaacgaacgcatcggcgcggcgtggggcgccaagccgttgtacttcaaggccggggcgtatgtgcaggacaacagtggcaacagcaaggaaggggcgcgggtgacgtttgccaaattagatattgatcacgagtaaggttatttcaatcatcccccgctacggcgggggaatgattacttggatataacgaactccgaagatcgtcttaccgctatagcaaaacagcataaaaattactatttcttgcagtgtgcctattagggcatacctcataaaatcatgtgcgtccaactcatgaaccgttcaggagttaaacacatgccaacgctagccaccattaaccaacctgccgtctcggggttcggcaccgggtcgcaaccaaaaatatacaatgccaccccaccgggttcttttgcgacgccgccccaaaacatgccagttgtcaccaggcccttcagatatctggtcttgtcgcacttattgagcaacaacaccaggattggcgatgtgctgacttattattgctaccctgtgccgtccgcaggtcttcctaccatgcttctggaacaaataacgcttaccgccgcgctgctacaatcttatatcaacaataaacgcgaacattttgagaaggaaatacaatgctaccttccaaacccaggaacctatgacgtttactgggagcttgaaaatgcatctcaaacatatacggagataggacagaatctgagatttacagtggtataactatagtaagcacaaagttggcttatttaatacctgaaaaactactgcgttacccacaatgaaaactactcactgtccttaggcaactactttacacctataaaaaacccgcatttctgcgggtttttttggcgctattggcttagttcaccttagcgttcaactcacctttcaaataccgctggtacatcgcttccaacgagattggcttgatcttcgaagcattgccggcagtaccgaacgcctcataacgcgcaatacacacatcacgcatcgcggtcacggtggcgccgaagaatttacgcgggtcgaattcgctcgggttggtggccatcaggcgacgcatcgcaccggtggacgccaggcgcaggtcggtgtcgatgttgaccttgcgcacgccgtacttgatgccttcgacgatttcttcaaccggcacgccgtaggtttctttgatgtcgccgccgtactggttgatgatcgccagccactcttgcgggaccgaggaagaaccgtgcatcaccaagtgggtattggggatgcgcttgtggatttccttgatgcggtcgatggccagcacgtcgccggtaggtggcttggtgaacttgtaggcgccgtggctggtaccgatggcgatggccagggcgtcgacttgggtctttttcacgaagtcggcggcttcttccgggtcggtcagcatctggctgtgatccagcacgccttcggcaccgatgccgtcttcttcgccggccatgccggtttccagggaacccaggcagcccagctcgccttcaaccgaaacaccacaggcgtgggccatggctacggtttgctgggtgacgcgtacgttgtactcgtagtcggtcggggtcttgccgtcttcgccgagggagccgtccatcatcaccgagctgaagcccagttggatggaacgctggcacacgtcagggctggtgccgtggtcctggtgcatgcacaccgggatgtgcggaaattcttcgattgcggcgaggatcaagtgacgcaggaacggcgcaccggcgtatttgcgggcaccggccgaagcctggacgatcacgggggagtcggtcttgtcagcggcttccatgatggcgcgcatctgctcaaggttgttgacgttaaaggctgggacgccgtagccgaactcggctgcgtggtccagcatttgacgcatgctgataagtgccattgtgttgtctctcccggtcgagggtcgttaatcgtgcaagcctgccgtagcggcggctgctattcaagttattgcagaccaggctttacacacctggcttgctgaatcgttattgctgtcaggcttactgcgctttgcagccacgcccgatcaaatcatcggtggcgacccagtaaaccaggccttcctcaccttttgtgtgaaacgccaattggccgtcgctgtacagcacgcccgaggcggcaacgtcctgcttgaggcggtaaacctggtcggaaccgcccaaacggacatccacctcggatttggcctgattagcaaagcgccagttcacctcagccttgctgtcgcaggtccacgtggtccacttgtcggcagtttctgccttgttgctgaacatgttcatgctgctgcagccggccaacagggccagggctgccagggcgaaaacgcctttcattgccaatcctcgtgaggcgaccgacggccgccagttgatcagacccatcaagggcaaccctgttcctgaccgttgggcgcggcgtcgtatttctccagccgttcgttgccgatgcgcttgttgatcaccggcatggtctcggcttgccagtcggcctggtagcagctctttttctgcccgggggcaggttcatctgccgcagacttcgcgttcggcgtgctgccgcaaccggccaacaggcccgctgcgatcaccaatgccaacgacttgatcatgggaatactccttttccggatcacgagcctcagcctttggctcgggtttccagcacttcaacggctggcagtaccttgccttcgacgaactcgaggaacgcaccgccaccggtagaaatgtaggagatctggtcagcaacgccatatttatcgatagccgccagggtgtcgccgccgccagcgatggagaaggccgagctttcagcgatggccttggccagcactttggtgccgttgccgaactggtcgaattcgaacacgccgaccgggccgttccacaggatggtctgggaggctttcagcagctcagcaaagttggccgcagtttgcgggccgatatccaggatcatgtcgtcggcagccacgtcagcgatcagcttgacagtggcttcggcgctttcggcgaactccttggcaacgacgacatcaaccggcagcggcacgctgactttggcagcgatggcacgagcagtgtcgagcaggtccggctcgtacagggacttgcccaccgggtgaccggcagccgccaggaaggtgttggcaatgccgccgccgacgatcagctggttgcagatctggctcaggctgttaagcacgtccagcttggtcgacaccttggagccagccacgatggcagccatcggttgcgccggcgcgcccagggccttgcccagtgcgtccagttcagcggccagcagtgggccggcagccgcgaccttggcgaacttggccacgccgtgggtcgaaccctcagcacggtgagcggtgccaaatgcgtccatcacgaacacgtcgcacagcgccgcatattgctgggccagttcgtcgctgttctttttctcgcccttgttgaagcgtacgttttcgaacaacacgatgtcgccagctttgacgtccacaccgcccaggtagtcagccaccagcggcacgtcgcggcccagggccttgctcaggtaatcggcgacaggcttgaggctgttttcggcagagaactcgccttcggtcgggcgacccaggtgggagcagaccatcacggccgcgcctttttccagggccagcttgatggtcggcagcgaggccaggattcgcgcatcgctggtgacaacaccgtccttgactgggacgttgaggtcttcgcggatcagtacgcgcttaccttgcagatcgaggtcggtcatcttcaacacggtcatgggtcgcagttcctgaattactgttgatgaggttgtttagaggcgatgtgcagataatgttccgcaacatccagcattcggttggcaaaaccccattcgttgtcgaaccaggccaggatgttcaccagcctcgggccggaaacgcgtgtctggctggcatcgacaattgccgaatgcgggtcatggttgaaatcgcaactggcgtggggcagctcggtgtaggccagcaaacctttaagcgggccgctggtggcggcgtcgcgcaggatccggttgacctccgtcgcatcagtgtcactgacggtctgcatggtgatgtccaggcaggacacgttcaccgtcggcacccgtacggctttggcctggattcgcccggcaagttccggcaacagtcgctcgatgccccgggccaggccggtagacaccggaatcaccgattggaacgccgaacgcgtacggcgcaggtcctcgtggtgataggcgtcgattaccggctggtcgttcatcgccgagtgaatcgtggtgatcgacacatagtccaggccgatcgcctgatccagcaggcgcaacaacggcacgctgcagttggtggtacaggaggcgttggacaccagcagttcattgccggtcaggcaatcctggttgataccgtagacgatggtggcgtcgacatctgcctcgctggccatcggctgggaaaacagcacgcgtggcgcgccggcgtcgaggaaacgctggccatcggcacgggtgtggtagacaccggaacattccagcaccaggtcgacgcccaatgccttccagtcgatggcttcgggggtggcacagcgcaacacctgcacgcagctgccattaatgtgcagacaatcgccctcgacccgcacttcgccggggaaccggccgtgggtggagtcaaagcgtgtcaggtattcaatgctggccatgtcggccaggtcgttgatcgcaacaatttcaaacccggccgccgcccctcgctcgaacagagcacgcaagacgcaacgaccaatgcggccgtagccgttgagtgcaactttgtagggacgcggttgaggcatggggttctcgatcaagggtagttcggtgttgaaagcaccatcgccatcgcgggcaagcccgctcccacattnnnnnnnnnnnnnaatgtgggagcgggcttgcccgcgatggcgccagtacagacaacgcagactgacttagtcttccagcagctcttcagcctggcccaggatgttttccagggtgaaaccgaactcttcgaacaacgctggcgccggcgccgactcaccgtaggtggtcatgccgatcacgcggccttccaggcccacgtacttgtaccagtagtcggcgtgagccgcttcgatggcgatacgcgcgctgacctgcaacggcaataccgactgtttgtagccggcgtcctgggcttcgaacacgctggtgcacggcatcgacaccacacgcacgttgcggccttgggcggtcagcttgtcgtacgcctggacggtcaggcccacttcggaaccggtggagatcaggatcagctccggctcgccgatgcagtccttgagcacgtagccgccacggctgatgtcggcgatctgtgcgtcggtacgtacctggtgttgcaggttctgacgcgagaagatcagcgccgaagggccgtccttgcgctcgatggcgtgcttccaggccacggcggactccaccgcgtcggctgggcgccagcaatccaggttcggcgtggtgcgcaggctggtcagttgctcgaccggctggtgcgtcgggccgtcttcgcccaggccgatggagtcgtgggtgtacacgtggatcacgcgcttcttcatcagcgcagccatgcgtacggcgttgcgcgcgtattccatgaacatcaggaaggtcgcgccgtaaggcaccagaccgccgtgcaaggacacgccgttcatgatggcgctcatgccgaactcacggacgccgtagtacatgtagttgccgctggcgtcttcagccgagacacctttgcagcctttccacagggtcaggttggaaccggccaggtcagccgaaccgccgaggatctccggcagcaacgggccgaaggcattcagggtgttctggctggctttacggctggcgatggtctcgcccttggccgcgacttcggcgatgtaggccgaggctttttccgagaagtcggcaggcaggtcaccggccaggcgacgtaccagctcgttggccagctcagggaattcggcggagtaggccgcaaaacgctggtcccactcggcttcggtggccaggcctttttccttggcgctccactcggcgtagatgtcggccgggatttcgaacgggccgtggttccacttcagcgcttcacgggtcagggcgatttccgcgtcacccagtggggcgccgtggcagtcttctttgccctgcttgttcggcgagccaaagccgatggtggttttgcagcagatcagggtcggctgtgcgctcttgcgggcggtgtcgatggcggtcttgatttcttccggatcgtgaccgtcgacgttgcggatcacctgccagttgtaggcttcgaaacgcttcggggtatcgtcggtgaaccagccttcgacttcgccatcgatggagatgccgttgtcgtcgtagaaggcgatcagcttgcccaggcctagggtgccggccagggaagcgacttcgtgggaaataccttccatcatgcagccatcacccaggaatacgtaggtgtggtggtcgacgatgtcgtggccaggacggttgaactgcgcgcccaggactttttcagccagcgcgaagccaacggcgttggccaggccttggcccaggggaccggtggtggtctcgacgcctggggtgtagccgaattccgggtggcccggggtgcgactgtgcagttggcggaagctcttgaggtcgtcgatggtgacgtcgtagccggtcaggtgcagcagcgaatagatcagcatcgagccatggccgttggacagcacgaagcggtcacggtcggcgaacgacgggttgctcgggttgtgtttcaggtagtcacgccaaagtacttcggcgatatccgccatgcccatcggggcaccgggatggccgctgttggctttttgcacggcatccatgctgagggcacgaatggcgttggcacgctcacgacggctgggcatcgctgatctcctgaggtttgaatataaaagaaacggaaaaaaggaccggcattttccctcagccaccgcctgcgggcaatgacagatagtcacttgagggtgtttttcctgtgctttgggcaccaatcgcttgcagaaacctttaaccggttcgtctaaaggttatagcggccgcttataaccgccacttatcgatcaatatcaaaactttttgatattggccttgcgagcctgtcgccccatcactagactgctggccttatgaatctacccatgccctcactgcgtgccgacgacggcgatgaactggcagccttgtgcaaggccgctggcgacccgctgcgtctgaacgtgttgcgcgcgctggccaacgattcctttggcgtgctggagctggcgcagatcttcgccatcggtcagtccggcatgagccaccacttgaaggtattggcccaggccgatctggtggcgacccgccgtgaaggcaatgcgattttctatcgtcgcgccctgccccacaccgaactgctgggcggcaagctgcacaccgccctgctcgaagaggtggacaacctgagcctgccgcttgatgtgcaatcgcgcatcggccaggtccacgggcagcgcgccgctgccagccaggactttttcgcacgggtggcagagaagtttcgtgcccagcaggacctgatcgcaggcctggctcaataccgcgacagcgtactggcgctgctggacaagctgagcttcagtgacgaggccacggcgctggaagtcggcccgggcgatggcggtttcctgccggaactggcgcggcgctttcaccaggtcacggcgctggacaacagcccggcgatgctcgacctggcacgccagctctgcgagcgcgagtcgctgggcaatgtccgcctgcaactggccgacgcactgagcagcacgacaatcaaggccgactgcgtggtgctgaatatggtcttgcaccatttcgccgcccccgccgaggccctgaagcaaatggccgggctgctgcaccccggcggtagcctgctggttacggatttatgcagccacaaccagaattgggccagggaggcctgcggtgatctctggttgggttttgaacaggatgatctggcccgttgggccaccgctgcgggactcgttcccggggatagcctctatgtaggtttacgcaatggtttccagatccaggtccgccattttcagcggccggctggcgacactcaccatcggtaaatatcaggaaaacatcgagatgagcgaatactcccttttcacctccgagtccgtgtctgaagggcatccggacaaaatcgccgaccagatttctgatgcggtgctggacgccatcattgctgaagacaagttcgcccgtgtggcgtgcgagactctggtgaaaaccggcgtagcgatcatcgcgggcgaagtgactaccaccgcctgggttgacctggagcagatcgttcgtgacgtgatcaccgacatcggctacaccagctccgacgtcggcttcgacggcgcgacctgcggcgtgatgaacatcatcggcaagcagtccccggacatcaaccagggtgtcgaccgcgccaagccagaagatcaaggcgccggcgaccaaggcctgatgttcggctacgccagcaacgaaaccgacgtgctgatgccagcaccgatcaccttctcgcaccagcttgtgcagcgtcaggcagaagcccgcaaatccggcctgctgccgtggctgcgcccggacgccaagtcccaggtgacttgccgttacgaaggcggcaaagtcgtgggtatcgacgcggttgtactgtcgacccagcacaacccggaagtttcctacgccgacctgcgcgaaggcgtcatggagctgatcgtcaagcacgtgctgccggccgagctgctgagcaaggacacccagttccacatcaacccgactggccagttcatcatcggtggcccggtgggcgactgcggccttaccggtcgcaagatcatcgtcgacagctacggcggcatggcccgtcacggcggtggcgcgttctcgggtaaagacccgtccaaggttgaccgctcggcggcctacgctggtcgttacgtggcgaagaatatcgtcgcggccggcctggctgagcgttgcgagatccaggtttcctacgctatcggcgtggcccagcctacgtcgatctcgctgaataccttcggcaccggcaagatcagcgacgacaagatcgtcaagctggtgcgtgagatctttgacctgcgcccttacgcgatcaccaccatgctcgacctgctgcacccgatgtaccaggaaaccgcagcgtacggccactttggtcgtacccctgcgcagaagactgtcggcgacgacaccttcaccaccttcacctgggaaaaaaccgaccgcgccaacgacctgcgtaccgccgccggcctgtaaccgctcaaggtgtacaaaagcctcgccgggtttgcccggcggggctttttattgcaccgcacgttgcgcgacgcccctcacattttttggatccaatgcttgcaggcccaatgatggccctctagaatccgcgccctctcgggcctctcaccttatttggatattgccctgcgccagcccgggagtcccaagcgtgcaggcaatcgaacattgaggtttttcatgcgcatctccacgctcgcccccgccgcccttctgctcagcctgttcgccctgccggcccacgccgccgacctgagcgcactgagcggcgccctgagctcgcagctcggtggcggcaattccggcgactgccagaagcaagccgcagacctgcaaaccaagatcgatgcagccgaagcccagaaggacaccttgaaagtgaaggccttcaaggccgcgcaagaccagatcaacaaaggctgtgacaaactttccgaagcgcaggccaaagccgatgccaagcagcaaacacaggaagccaaggccgataaacctgacgcggtgaaagccctgggcggcctgttcaagtaaacagaaacacccggtaaaaagccccgcactgccggggcttttttgtggccgcagggttccattaggctgggcacccttttcgagcaaggatgctcatgatgcgtctactgatggcccttttactcagtattttaccgttcagcctatgggccgaagattgccccgacgatgctcgggcccaggtcagcaccctggccaaacaaatccgccagtgggatgacagctaccaccggctcggccaatcccctgtgagcgatgaactctacgaccaggcccgcctgcgcctggcccactggcgccagtgcttccccgacacccctttgacgcccgacaacccactggcgagtgcacgcggtacccggctgcatcccgttgcccataccggcctggagaaactgctggatgaacaggcagtcgctgcctggctggccacccgcgaggatgtctggattcaaccgaaggtggacggtgtggcggtgaccctggtgtatcgcaaggggcgcctgagccaagtcatcagccgcggcgatggagcaaagggccacgactggtctgcctccgcgcacaaaatccccggcatagtccagcagttgcccgagcgcatcgacctgctgctgcaaggtgaactctattggcgcctcgatggccatgtgcagtcggccaccggcgggctcaatgcccgtagcaaggtggccgggctgatgaaccgcaaacaattgagcgacaccgacgccgcaggcattggcctgttcgtctgggcttggccgaaagggccggcagcgtttaccgagcgcctggccacactggaacgctggggcttcaccgatagccgacgctacagccaccccattcgagacatcaccgaagccgcgcattggcgcacctattggtacaaccatccattgccgttcgccagcgacggcgtggtgctgcaccaggcgcagcgcgcacccgccgaacgttggcaggtcgttgcgccgtattgggcgactgcatggaagtacccggccgccaaagccctggcactggtgcgcaacgtgcagttcaagatcggccgcaccgggcgcatcacccccatgctggaactggagccggtacgcttggacgaccggaaaatcagccgggtaagtgtcggctcattggcacgctggcaagcgttggacatccgacctggcgaccaggtctccatcagcctcgcgggccaggtgattcctcggttggacgcggtcattctgcgcagtaccaccagggtggacctgccagtgcccaaccctggcaaattccatgcgatgagctgctggcaactggaccccgattgcgaggaacaattactggcacgccttacctggctcagtggcaaccagggcctcgcgttgccacacataggtcgcgagacctggaacgtattgatccaggccggtctaatcgcaggctttctcgattggttaaccctggacgcggcagagcttgctaacattgatggcttcggtgatcgcagccgcgaacgcgtgctcgaaagccttcacagcgctcggcagcggccctttgcacaatggctcaaggccctgggtgtaccgcctgcggcacgtaataacctggagggcgactggcagacgctggtcgccagagacacccaggcctggctgaacattgatggcatcggcccgggccgcgcagcgcaactgagcgctttttttcgcgacccgcacgtacaggccttggctgaatcattacgcatggcggggatagacgggttttgaaccccgctgcccccgccatcagattgcgactttggagccccacatgaaatttctagccccttttgccttgctgaccgtcgcaagcttcatgaccacaccgttgctggccgctgaacaagccgcccccctcaccggctgcgccgccaaacgccaagccatcagcatccagatcgaacaagccaaggcccacggcaacagcgcgcaacaagccggcctggaaaaagccctgagtgaagtcaccgccaactgcaccgacgcctccctgaagaaggagcgtgaaaacaaggtgctcgacgccaagcacgaagtcagccgccgtcaggccgacctcgacaaggccatgaaaaaaggcgacgcggacaagatcaacaagcgtaaggataagctcgccgagtcccgcaaggaactgcaggacgcggtggaagagctcgaccagtaaaaccggtcagtggtcacggaactgtttatggcaggcgctgcaggcatcttcgactttctgcaccgccggccccaggttactggccttgtagggctgcacttggctggcagtcaccaattcgccggtggccgcttcaaggttgcgggccagttgctggaattgcgcctgtttctgccagacatcgtccttggcgctggtgtgatcttcttcgcgcacgcttgggaaatgtttccaaggctcatgggacaaggcgtccagcttgaccgcaccctcggcaaatttggcgccgtcgaacgggatgcgcccacgcaacatgccgcccaggtcttcgccggtcttgagcatctgtttgaagattgccttgcgctggcccagcggcgaattcggatcaacaccgccacaggcggacagggccaggcaggccagcagtacaacagtcagtcgtttaaaagtcatggtggcttcgaggtcacgggaaacggcggccagtatcctcgccccgcccataaagaccaatagccctattaataataagggttgcccaaaggtgttaccgcgcgggcaatcgcttcaggaagtgtttgtatgaatgtaacctttaaaccctggagccgccgcctggcgtgggctctgccgatgatcgcgctgctggccggctgcgacgcgggcaaagaagcagccaaagatgaaactcccaagccccacgccgtcgccacctatgtcagtgcgccgtgggaggcgttgccggcggtgtctgacaacgacctgctggccggttttgaatcctggcgcagcgcctgccagcgcctcaaggcagacccgatctggggcgcgacctgcgcagccgccgctacggtgcccggcaatgccgtggccgtgcgcgggtttctcaaggagcgtctggatgtgttcggcctgcgctcggccgacaacaccccgaacggcttgatcaccggttactacgaaccggtctaccccggcagcctgaccaagaccgccaaggctaacgtaccggtatatggcgtgccggacgacttgatcatcgtcaacctggaaagcatctacccggagctcaagggcaagcgcctgcgcggtcgccttgaaggccgtgtgctcaaaccgtacgacgatgccagcgccatcaacggccagggctctaccgccaaaccgattgcctggctgactgacccgatggacctgcaattcctgcaaatccagggctcaggccggatccaactggccggagggcgccaactgcgcgtcggttatggcgaccagaatggctacccctatcgccctatcggccgctggttggtggagcaaggtcagttgaagaaagaagaggtgaccatgggcgccatcagcgcctgggccaaggccaacccgcagcgcatcccggaactgctggcgagcaaccccagctacgtcttcttcagcgcccgccccgacagtaacgaaggcccgcggggttcactgaacgtgccgttgaccgcaggctacagcgttgcggtggatcgcaaggtgattccgctgggcagcctgttgtggctgtcgactaccaaaccggatggctcacccatcacaaggcccgtcgccgcccaggacaccggcggtgcgatcacgggcgaagtgcgcgcggacctgttctggggcactggtgaggcagcgggagaattggcgggcaacatgaaacagcaggggcagatatggatgttgtggcccaagggcgcagcattgccacaggtgccggatgcacctgccgggacctgaaagcggtctgtccagcttggttcagtggggtgagcggccttgctagtgggcaagcttggcctgttgtggtgagcgggcttgccccgcgttgggctgcgcagcagccctcatcagcctcaccacatttcttcaggcacaccgaggtgtatggttctggggcggcttcgccacccaacgcggggcaagcccgctcaccacaacaagcacgctcataacacaaaaagcacgctcaccagcaaagcccacacccacaggggacctgcttcaaccgtcagatcgagacgaagaagaaactcgcaatcaacgccatccccacaaaccacaccagcgaacgcagcatcgcccagtccgccagatagcagatgatgtacagcaggcgactggtgataaacagcacggccagcacattgatggtcaccaattcggccgtaccggccaggtgcgcgataatcacggccgccgcaaacgccggcgtgacttcaaagctgttgagttgcgcactgtgggcccgcttggcaaacccttcgagggtgtccaggaaagcgcgggggtcgtggttctgccgtggtccgaacttgccaccactgaacttggccacgcctgtgcacagataaggcaggaaaattgcgatcaacacacaccagaaggccaccgtcatcactgattccttttttaattttgttttaagttttaaacagaaattagagttttagcactaaacctgtaaaaccgcacccaccgctatgaaccgctgcgctcggaaaggttctatcggtgatttgcccacacgcctgcaacatcgcaccactgttgcggtccatcccccatcgacgctctctccccaacttccaaggaccccggatgctcgaacttgtcgccgcctttatttgccttaccaccctgctcacctacgtgaactttcgctttatcggcctgccacccaccatcggcgtgatggtcacagcgctggtgttttcactgatcctgcaaggcttgagttttctcggctaccccggtcttgaggaacgcatccagcaactgatcggccagatcgacttcggtgatttgctgatgaactggatgctctcgttcctgctgttcgccggcgccttgcacgtcaacctgaacgacctgcgcagctaccgctggcccatcggcctgctggcgacctttggcgtgttaatcgccaccgtggtgatcggcagcctggcgtattacatctttgccttgtttggctggcatgtaagcttcctctactgcctgctgttcggcgcgctgatctcgcccaccgatccgattgcggtactgggtgtactgcgtaccgccaacgcctccaaacccctgaaaaccaccatcgtcggcgagtcgctgttcaatgacggcacggcagtggtggtgtttaccgtattgttgggcatcgcacagctgggcgagacgccaaccgtgggcgctaccgccatgctgtttgcccatgaggccatcggcggcgtggtgttcggtggcctgatcggctacctcgtttacctgatgatcaaaagcatcgagcaacaccagatcgaagtgatgctgaccctggccctggtgatcggaggctcggcaatggccaccgaactgcacgtctcggcaccgatcgcgatggtggtcgccggcctgatcatcggcaacctggggcgcaagctggcgatgaacgacatgacccggcgctatctggacggcttctgggagctgctcgatgacatgctcaacgccctgctgtttgcactgatcggcatggaactgttgctgttgccgttcaactggctgcacgtgttcgccgccagcctgctggccgtcgcgatcctgctgtcgcgcctgctgacagtcgccccagccattctgttgctgcgccgctggcgcacggtgccacgcgggaccatccgcatcctgacctggggtggcttgcgtggcggggtttcagtggcactggccctggccttgccactgggcccggagcgcgatttgctgctgagcatcacctacatcgtggtgctgtcgtcgatcctgctacaggggttgagcatcggcaagctggtcaagcgcgtgacccaggacgagccccaggccacgcctgacactcactgatccttgttgatccgctgcggatgcctggggtccgcagcttttttgctcggcaggctgctttcactgcgaatctgtgcgtgactgatcagtgcaaagataaagctgccgccaatgatattgcccgccagggtcggcccggcgaacaccagccagaagtccttccacggcaactcgccggcaaacaccaggtacgacacttccgccgagccgacgacgatatgggtgaagtcgcccaatgccatgaggtaggtgatcagaatgatgatccacatcttggcactttccatggacgggatcatccacaccatggtggcgatcatccagccggaaacgatgcccttggcgaacatctggccggggtcgttctccatgatcttgcgcccgatctcaaggaacgccatgtcggtcctggtatcgaagatcggcaagtgcagcatcacgtacgccaccagcaaggtgccacacaggttacccaccagcaccaccgaccataaccgcagcaggcgaccggcattgcccagggtgggcttgctcatcaccggcagcacggcggtcagggtgttttcggtgaacaactgctggcgcgcgagaatcaccgcgaggaagcccgcgcagtaaccgaagctggcgatcaccttgaacgcttcgccctccggcagacgggagttgagcaaccccatggccatcagcgacagccccatggtcaagccggccgccagcgccgaccaccacagggcggcaacgctgcgctcaagctcctggtcgccctgggtgcggattatttcatgcagtaccgccgcgcggggcggctggttcttgtccacgtcctgctgctcttcctgcgacaggttgggggtcttgccgtctgtttgagtggccatgatgtaccagagtccgaggggtgcctgtagctacgacacgccacggcgatggctgttcagtggcctgacgactaaaccggtatgcgccaggccttggcggcttccacagtggtagatctgaacggggtgctccagggtttattgcgcgccttgtagtatttgacgatgccttcgagcacgttgttgaacgctggtggtgtcctggcatccgccaagtcacgggccgcacgccgcagcagctcgatattggcctgcggctggccaggccgatagagcgacgggtagatgacttcccgcgtgaagttttcggcctttaccgcaagatcacgcctgctcatctgcgcaaccgcgctcgtcatgactttcgacatcgccgctgtgtcgccaggtgactgcttgctcatcacttgcagaagctgctgaaaattaggcctgccgactgcattgagacgccgccccaaccactcgacatactcgggacgacgcgccagcgcatccagattacgcaacgccgccgccaacctgggagtcaccgtcagcttgtcactggcctgattggcttcggtaatggcggcctccagcgcctgcatcgcttgctgtgcgctcttgcgaaacatcagcacatccttggcggcgggatccttctccagatcactctcaacgctcgccagcattttgtcgtccatggccaacacagcgacgtccaatgagcggaattggtagcgttcacgcaacgcggcacgcgtgtccagatgtgcgctcaccgccgcacgcgccgacgcctgcagatgctttttctgatcgtcggtcatggtgaagttaaccgtgccattgagcaggttacgaaagtcacccttttctgatttcagcggtaacacgacagtctgatccgcttgcgccttgagcttgtcttcctggtacccctcggcagccgcatgcgggacacccatgatcgtatcgaccaggccgctccccacgctacctgccttggcaggctccaggttttcagtttcaaacctgacgaccagtgactcggtcttgcacagggggctttctggaaaaggcggatcaatcaccgcagaagacggcgtattgaccagcagtccaccatccagaaatgccttttgctcagcgtgctcctggaaggcatggccttgctctttcgggcttttgaacaacccaggcaatgagccggatatgtgagccgccctggcaatatccatgtccggggtggtgctggaattgaagaccaccaactgtggtcggccatcgaacagaccggttcccgtgatattgagctgcttgaccgcaggaatgtgacgactcaacacctcaatatcgcgaaaagtcggccctttccctgcactgagccggtccgcaatcttcatgacgtcggcaggccggtcttcccgccgggtcccggcgatctttgccagcagcgacttgcgcgcctcattgccgatcaggtcttccaggggctgcgcttcggtttgcaggcgcggtatcagggtgaacaataattgcgcgatgtttccggccgttcctggcaagcgccctgccaattttccaatttcagtactggcattctgcagctttgcaatcaaaggattcttgctgttcagcaactcaggcaggttgaggccgttcgacaggcgtgcaaaagttttggcatccatgccactggccagcaacacagcagaaattgcgcccgcggatgagccggagatcactttgacgcccaccaacgccttgtggtcttcgagcgcctggaccatgcctgggaacgcaatgcccttggccccgcccccactcaataccagatgtgtgagcggcggcggtgacaaaaccacctccacccggccatcgctggagcgctcaaggctcaccttgcgttcgcctacgcctttgaccagcaatgtctttacatttttttcagcattgtcaggcggctgaggttgagtactggcatgtgggctggacactttcatattcatacgcgccactctctacaggatgtcatcctgagtgacgcgagagcctgggacaggtccatccggaatgatttggtaaagcaaatcgacccggccctcgattactgtggaggagtgtcgtcctcgaactggtccttcacgtacctgatctgagtgcggccatgaggcgctggcaggccatcttcaccaaggttgacgaagaccattttttccacggtgagaatgctgctgcgggtgatcttgttgcgcacttcacaggtcagggtgatggaggtacgaccgaacgcagtggcggtgatgcccagctcgatgatgtcgccctggcgtgaggcgctgacgaagttgatttcggagatgtacttggtcacgacgcgttggttgcccagttggacaatggcgtagatggccgcctcttcatcgatccagcgaagcaggctgccaccgaacagggtgccgttggggttgaggtcttcgggttttacccatttgcgggtgtggaagttcatgttcactccaaagcgtgttgccgaatgatgggcaacatcatggcagaggcccgccccaagctctacgcgccattgcctatcagccccatgagcgatcttcatatggccgacagaaaggcttgggaagtctggcgcacacggctataatcgcccccgcttcaaaacggtcatcttcggttgataccgttctcccgccacctgtccgaggggcgctgcagcaggttcaacctgtcaggctcggatggggcgttgtccggacaggtaccacctggcctgatactaaacgcacaacggcgcccattcgcacactacgaatggaggctcttcatgagcgctgtcaacacgcctgcagatttcaacgactacaaagtcgccgacatgtccctcgctgcctggggccgtcgcgaaacctttatcgccgaatccgaaatgccagccctgatgggtctgcgtcgcaagtacgccgccgagcagccgctcaaaggcgcgaagatcctcggctgcatccacatgactatccagactgccgtgctgatcgaaaccctggttgccctgggtgccgaagtgcgctggtcgtcctgcaacatcttctcgactcaagaccaggccgctgccgcaatcgctgccgccggtatcccggtattcgcctggaaaggcgagaccgaagaagagtacgagtggtgcctggagcaaaccatcctcaaagatggcgcgccttgggatgccaacatgatcctcgacgacggcggcgacctgaccgagctgctgcacaagaagtacccgcagatcctcgatcgcgtccacggcgtgaccgaagaaaccaccaccggcgtacaccgcctgctggacatgctggccaagggcgagctgaaaatcccggccatcaacgtcaacgactcggtgaccaagagcaagaacgacaacaagtacggctgccgtcatagcctgaacgatgccatcaagcgcggcaccgaccacctgctgtcgggcaagcaagccctggtgatcggctacggcgacgtgggcaagggttcgtcccagtccctgcgtcaggaaggcatgatcgtcaaggtttccgaagtcgacccgatctgcgccatgcaagcctgcatggacggttttgaagtggtttcgccgttcatcgacggcgtcaacgacggcaccgccgccagcatcgacaaggccctgctgggcaagatcgacctgatcgtcaccaccaccggtaacgtgaatgtctgcgacgccaacatgctcgccgcgctgaaaaaacgtgctgtggtctgcaacatcggtcacttcgacaatgaaatcgacaccgctttcatgcgcaagaactgggcatgggaagaagtgaagcctcaggtgcacaaggttcaccgcaccggcgcgggcgatttcgacccacagaacgacgactacctgatcctgctggctgaaggccgcctggttaacctgggcaacgctaccggccacccaagccgtatcatggatggctcgttcgccaaccaggttctggcccagatcttcctgttcggccagaagtacgccgacctgtcgccggcccagaaagccgagcgcctgaccgtggaagtactgccgaagaaactcgacgaagaagtggccctggaaatggtccgcggcttcggcggcgtggtgactcaactgaccaagacccaggccgactacatcggcgtgaccgtcgaaggtccgttcaagccgcacgcttaccgttactgataagcctaccacccgccctccttgtgagggcgggctttcaatgtgggagggggcttgcccccgatagcggaatgtcagttaacaaatatgtcgactgatacctcgtcatcgggggcaagccccctcccacattgacggtgtacatctcccggttgtatgagtttcaaagggtattaccatgtcccaagaccgtcgctacagcttcgagtttttcccgaccaagaccgatgctgggcatgaaaaactgatggcgactgccacacagttggccagctacaaccccgacttcttctcctgcacctacggtgccggcggctcgacccgtgatcgcacgatcaacaccgtgttgcagctggaaagccaagtcaaagttcccgccgctccgcatttgtcgtgcgtgggcgacagcaaggccgacctgcgcggcctgctgactcaatacaaggctgccggcatcaagcgcatcgtcgcactgcgtggcgacctgccgtccggcatgggcatggccagcggcgaactgcgctacgccaacgacctggtgagcttcatccgtgaagaaaccggcgaccacttccatatcgaagttgcggcttacccggagatgcatccacaagcgcgcaatttcgaagacgatctgcagaacttcgtgcgcaaggccaacgccggcgccgacagcgcaatcacccagtatttcttcaacgccgacagctacttctacttcgtcgagcgtgtacgagccatgggcgtgaacatccccatcgtgccgggcatcatgccgatcaccaactacagcaagctggcgcgcttctccgacgcctgcggcgccgagatcccacgctgggtgcgcaaacaactggaagcctatggcgacgacgtcaagagcatccaggcgttcggcgaacaggtcatcagcacaatgtgtgaagaattgttgcaaggtggcgcgccagggttgcacttctataccctgaaccaggctgaaccaagccttgcaatctggaacaacctcaagctgccacgctgaaggttgcccggcggtgccaaggccctcgtctacgagggcctttgtcgttttacatgcccacggaacccagcagtccatgaatacagtgcccacgccgtcccgcccacaactggtctacctggtcttcggcgccgagacctaccaccaggaagcggtgttcagcatcgccagtgcgctggctttcctgcaggcaaccccggaagccgccgtggatatccaggtattcagcgacaaccccgagccctatcgcctcttgccggtacgtgtacgcccgctggacgaagctacccgcaaacgctggagcgaaccccacggctatcacttccgtaccaagcatgtggtattgcgccaagtgctggaagaatcgccggtggccatgctgatcgacaccgataccttcttccatcattcaccgatggacctgttcgagcgcgtgcaacccggcaccctgctgtgcaatgccttctacagcaagtacggcgacaaccacgagagcattctctacaccgccttgcgccagcgcctgctggacatgggcgtggccgacgatgaaatgatgacgctcaactccggggtcatgggcctgacgcaacaggatgcgcacatcctcgaccgctccatcgccttgatggacgaattgttcccctatgcccaaggcgcgtacaccctcgaagaattctgcctgtcgatcgccgcctatcgcaccgtcaacgtgcgcgaatgcccggacctgatccaccactactggagtcgcaagcagctgtttcgcgccaaggtcaaggcctggatcgccaagcatgcggccgcgcccaccagcgcactggcgttggccgacactcgcaaggtgtccgcgcacctgccacgccctccccgcctgcagcgtcttctgtacaagctgatcacgctggtgctgcccaagcaccagcagcaattcatccgtgaaattctctacggctgctacgagcatgagaacgagttcgaccaggcgtgtggcccggtttggtgggacaaggcccggcagaacctggaagaacgccagaagcgcccgatcgacactcatcagttggagcactggtttgccaaccccgtggtacgcctgatcctcggcgagcgacgggcagcgatctacgaacacttgatgacctctccgggcaaatagcccggcccgcggatgcgcgtgccagagcttctctttagtgcgggagcgtcgtaacctcagggcatgcccgtcattctgaagttgttgactgccgccctcttcacttgcctgagcctcgccgcttatggcgagaagctgcgcattgtcaccgagccctgggcgccctacgtgtatgaggaccagggcagcatgcgggggctggactatgaaaccacggtgatcgtgttccagcgcctgggcgtggaggtggaatggcagttcctgccctggaagcgctgcctggccatgctcgaccaaggccatgccgatggcgcactggatatctttcacagccatgaacgcgacgccttgctgctgtaccccagcgagccactgtcggaagtggagttcacgctgttctacgccaatgagcgcccccaccccgtgcaaagcctcgaagacctgcgtggcctgaccgtcggcacatcgccgggctatctgtacggcgcagcgttcagcgactcccccctgttcagtcgtgaaccggcaccgagccatgaggccaacttcggcaaattgatgctgggacgcatcgacctggtgatcaccgaccgtcgcgtaggccagcatgtgatcaaggcgctgggcctggaaggcaaggtcagccaggcgccggccgtggtcagccgccaacagcaatttctcgcggtacgccgtagcgcaggcatggacctgctggtacagcgctttgccgccgagctcaaacgcttcaagcaagagccggcctatagcgccttgagtgccaaatatggtggaatccaagccattacggcctccggacgcaccgttgagcagcaggaaagcagcgcacagtgattgctctgttatactccggcctttccgccaggctcacgcccggccgctgaggtcttgaaaaaggcacccaacccgctacagcgcagctttcagcccgcgcgagccggtggagtgcccgccagacgcagcaggaccggacggggttgcgctcccctaagcgccattcacgcccggcaagattatccctttgggccaagccctaactaaaacaggattactcatgtcctttgcttccctcggtctctccgaggctttagtccgcgccatcgaggcagcgggctataccgagcctactccggtgcaacagcgggccattcccgccgtgttgcaaggtcgcgacctgatggttgcggctcagacaggtactggtaaaaccggcggtttcgccctcccgattctggagcggttgttccccaacggtcacccggacaaatcccagcgtcacggcccgcgccaaccgcgcgtactggtcctgaccccaacccgcgaactcgccgcccaggtgcatgacagcttcaagctgtatgcccgcgacctgaagttcgtcagcgcctgcatcttcggcggcgtcggcatgaacccacaggttcaggccatgtcccgcggcgtagacgtgctggtggcctgccccggtcgtttgctcgacctgtgcggccaaggcagcgtcgacttgtcccatgtggaaatcctcgtgctggacgaagccgaccgcatgctcgacatgggcttcgtccatgacgtgaaaaaggtcctcgcccgcctgccggccaaacgtcagaacctgttgttctcggccacgttctcccaggacatcaccgccctggccggcaagctgctgcacaacccggagcgcatcgaagtcacgccgccgaacaccacggtcgagcggatcgagcaacgcgtcttccgcctggccgccagccacaagcgtgcgctgctggctcacctgatcaccgcaggcgcctgggaacaggtgctggtgttcacccgcaccaagcacggcgccaaccgcctggccgagtacctggacaagcacggcctcaccgccgtcgccatccacggcaacaagagccagaacgcgcgcaccaaggccctggccgacttcaaggccggctcggtgcgcatcctggtggccaccgatatcgccgcccgcggcctggatatcgaccaactgccgcacgtggtcaacttcgagctgccgaacgttgatgaagactacgtacaccgtatcggccgtaccggccgtgccggtcgttcgggcgaggccatctccctggtcgcgccggacgaagaaaaactgctgaaaagcatcgagcgcatgaccaagcagaaaatcgccgatggcgacctgatgggcttcgatgccagcgccgtggaggccgagaagccagaagcgcgcgagcgtccggacgtacgcaacccacgcaacccacgcggtccgaagggcgatggcccgaacggcggcgggggtggcggtgggcgtcgcgacaagggcaaagacaagggcaaggaaaaatccgccaccagcggccgtggcgaacgcccagcccgtgagcagaagccccgtgaaggcaccccggcccgcgaacagcgccagccgagccagccgccacgcgccgctgccgaccgtgctccggacgagttcctggatgacgatgtggataacttcggcaaccgcgttgactacgtaccccaggccaagccggcccaaggccgtggccgtcgcccaggtgctccggcacagggtgcgggtgcgggcgctccacgtggcggccagccacagggcggccgtcagaatggccctcgcaacagcagcggcggcaccaccggtacgccgcctgccaagcgcaacggcccgcgcaatggcgcaccccgtgacggtcaggcccgccgtgaagactcgcgcagcaacaaccgccgcccggcccgtgacgaccagccacgcttgtccgaaccagccgtgcagaacccgcgcggtggcccggcgccgaagatcatccacaaggagtcgaaggcagatcgcttcccgacacccgagcagttggatcaactgccaggccgtcctcgtggtgaaaagccagcgctgctgacgcgcaatcgctgagttttatagccccatgaaaaagccccgcatctttcgatgcggggctttttttgtacaggcagaaattacttctgcttgacaccttccagcgagatgtccaggtccacagtctgcgaggacgggcctgggcccttgatgccgaagtcgttcaggttgacggtggtggtggcgttgaagccagcacgctcgccgccccatggatccttgccttcaccgttgaaggtggccttgaaggtcaccggtttggtcacgccgtggaaggtcaggtcgccagtcacatcagcagttttcgcgccagttggcttgactgcggtggacacgaacttggcgtcggcaaacttggcaacgtccaggaagtctttgctggcgatgtgcttgtcacgttctgcgtggttggaccacaggctggcggttttcacgtcgaccgcgattttgctggcctctggcttggcggcatcccagctgaaggtaccgtcccaatccttgaaggtaccgtgaatgtagctgtagcccaggtggctgattttccagtcgatgaaggcgtgctggccttctttgtcgatcttgtagtcagcagccatcacctggcctgcggacagcagggcagtaccgattgccagagcagcgagggtctttttcaacatgctttctattccttgtgagtcgaggttgaacatcaggctttgcgccccagcattcgcgtgagggtcgcatcacgatcgataaagtggtgtttcaacgcagccacgccgtgcaagccggcgaagaccaccagcacccaggccaggtacaggtgcaccaggcccgcgttatctgcctggtccggtagcccggaaaccacggcaggaatctcaaacagaccaaacaccgggataccgacaccgtctgcggtggaaatcaggtaaccggcgatcatcacggcaaacagcccgagataaaggaacgcgtggccaaaggccgcgccgatacgggtcatgcggctgtaactggccaacggtggcggcggcgggctcaccatgcgccagacaatacgtaccagcatgatggcgaacagcgtgatgccaatgctcttgtgcaggtctggcgcgtctttgcgccaggcgctgtagtagtcgagaccgaccatccacaaccccagggcgaacaagccaaacaccaccagggccacgccccagtgcaaaaccatgctgacccaaccatagcgggccggtgaattgcgtagctgcatgtacttaatcccgtaagagctgtgcccaagactagcgatttacctatcgaattaaagcggaaaatttcgctttgaaatatcgagaaatacgatcaagagattatgcacagtacgttaacaatggattaaggactattcctaagaaacgtgacagaccgtcccgcgtttactacgaattcagccgttatgggttgtgacacagccgcccattgcataggcttgcgcgattgtttcacctgcgccggccgcaggaccgcttcgaggagatcaccgatgggcttgaacaaccagtggatgcaacgcgaccttgccgtgctgtggcatccctgcacccagatgaaagaccaccagcaactgccgctgatcccgatcaagcgcggtgaaggcgtctggctggaagacttcgaaggcaagcgctacctcgacgccgtcagctcctggtgggtgaacgtgtttggccacgccaacccgcgcatcaaccagcgtatcaaggaccaggtcgaccaactcgaacacgtgatcctcgccggtttcagccaccagccggtgattgaactgtccgagcgcctggtggcgatgacgcccgagggcctgacccgttgcttctatgccgataacggctcgtcgtgcatcgaagttgcactgaaaatgagcttccactattggctcaaccgcggcctgccgaacaagaagcgcttcgtcaccctcaccaacagctaccacggcgaaaccattgccgcgatgtcggtgggcgacgtcccgctgtttaccgagacctacaaggcgctgttgctcgacaccattaaagtgccaagcccggactgctacctgcgccccgagggcatgagctgggaagaccactcgcgcacgatggcccaagtcatggaacagaccctggccgagcaccacgataccgtcgctgctgtgattatcgaaccgctgatccagggcgccggcggcatgcgcatgtaccactcggtttacctcaagctattgcgcgaagcctgtgaccgttacggcgtgcacctgatccacgacgaaatcgccgtgggcttcggccgtaccgggacgatgttcgcctgcgagcaggccggcatccgcccggacttcctgtgcctgtccaaggcgctcaccggcggttacctgccgttggccgccgtggtcaccaccgaagatgtctacagcgccttctacgacgactaccccaccttgcgcgccttcctgcattcccacagctacaccggcaacccgctggcgtgtgcggcggcactggcgacgctggatatctttgaagaagacaacgtcatcgagaacaacaaggccctggcccagcgcatggccactgccactgcacacctggtggaccatccacatgtctcggaagtgcgccagaccggcatggtgctggccatcgagatggtccaggacaaagccaccaagaccgcctacccgtggcaggagcgccgtggcttgaaagtgttcgagcatgccctggaacgtggcgcgctgttgcgaccgctgggcagtgtggtgtatttcctgccgccctatgtgattaccccggagcagatcgacttcctcgccgaagtcgccagcgaaggcatcgatatcgccaccaacagcaaggtcagcgtggcggtgccaaaagatttccacccaggcttccgtgatccgggctgattgcccgcactccttttccagagaacagaaatgagactgtcccgctttttcaccgacaccccgctgagcatcggcgatcacgaactgcccgaagcccaggcgcactacatcagccgcgtgctgcgcatgggcgaaggcgatgccgtgcaattgttcgacggttccggccaggagttcctgggcacactgctggaggtcggcaagaagcgcgtcaccgtgcaactgacggaaaacttcgcaggccaggccgaatccccgctgcacatccatctcggccagggcctgtcccggggcgagcgtatggactgggcgatccagaaagccaccgaactgggcgtcaacgccatcacaccgattttcagcgagcgctgcgaagtgcgcctcaaggacgaacgcgccgacaaacgcctgctgcactggcgccaggtggcgatcagcgcctgtgaacaatgcgggcgttcgacggtgccggtgatccacccaccgctgttgctggcggactggttgaagcagaccgaggcggatttgaagctggtgctgcacccggtggccgagccgatggtcagccatgccaagcctgccagcctggcgtttctgatcggccccgagggcgggctgaccgaccacgaagtcgaaaccgcccagggtgccggctaccacgccgcccgcctcggcccgcgggtgttgcgtaccgagacggcgccggtggtagcgctggccgtcgcccaacagctgtggggcgacttctagggtttactccaccggatcgctgatcggtttggcgatgatcgccttcaactcagtggtcatcgggaattccaggttcaagcccttgggcggaatcggctgttcaaaccagcgctggtaaatcccgttgatctctccgctgcggtacaggtctgcgagtgtctcgttgaccaccgccaggaactgcgggtcgtccttgcgcaccatgcagctgtagatttcccgcgattgctcctcgcccaccaccacccagttgtgcgggtccttggccttggcgcgttcgccgtagagcaacgcgtcgtccatgtagaacgccgtcgcgcggccggtctcaagcatcttgaaggcttcgccgtggtccttggcgctgatcacgaacatattggccttgtgctcggcgttgtagcgcttgaggaaacgttcgttggtggtgccggccgtggtcaccacgttcttgcctgcaaggtcggcgaaaccctggatgccgctgtcttttgccgtgagcaactgccccttcacatagataaacccgtaggaaaaccccacctgtttctgccgctcggcggtcaccccggtggagccgcattccaggtcgacggtgccgttctgcaccagcgggatacgggtctgggacgtcaccaggttgtacttcacgttgagcttggccaccccggttttgtgctggatgcgctcgacgatcttgttcgccagctccactgaatagcccatgggcttgccactgttatcgcccacgtaggaaaacggcaccgacgcatcgcgatagcccaaggtgatggacttggcgttggcaatcttgcccagcgtgccgtccagcggcgtttgattggcatgggcctgcgcgcccagcaaaagccccagggtgcagccggtcaacaggatctttttcattgttattctccgttggttttcgggttgtgagtcttcacgcagcgcggggcgtaaggccccgcatatcaatggagggcgtttgctggccgatcaattcagccagtaactggccgctgccacaggccagggtgaagccgagtgcgccgtggcccaggttcagccacaggttgcggtagacgcctgcgccgatcagcggcacaccggtcggagtggccgggcgcatgccggcccattccactgcgtgggcgtaatcccctgcaagcggaaacgtctccacggcctggcgtttcatcagcgccaggcgcttgggttcgacgcgggcgtcgaagccgacgatgtccaccatggccgcgacccgcagttgttcgccgatacgcgcgtagaccatcttgcggtcatagtcggtgatgctcacgttcggcgcctggtgccgggcgccaatcggcacgctgaggctgtagcccttgagcgggtacagcggcagcgacacgcccaactcggcgctgcgatacccggccgacagcaccagatgttcgaccggcatcacttcatcaccgacctcgatggcctgcaccgcgccctcggcatggcgaatcccggtgaccttgcgccctaacaagaaggtgcaacgtcccgatgcctccagccgcgccgccaagcgctggcagaaggcatgacaatcagcgacctcttcattcggcgtatagatcccgccgacaaatccaccgcccgccaacgccggttccaggcgcgcgcaatcagcggccgagagcacttgctgttgcaggatatcggtgaccttgctgcgggcatgctcaaaggagccggcattgcgaaaggtcaccagcttgccgttgcgccgccagtcgaaaccgtccaggtggtcgtcctcgcgccactgctgcaaggtgtcctggctcaggcaggccaagcgcagcaggtgcgcggcattgcgcttattcaccgagccacggcaagcgccgaggaacgccgccatccagcgccactgttgggggtcaaggcgcgggcgcagcttcagcggcgagtcaccgcgcagcaaccagccaatggcttgcagcggtacacctttatccgccagtggtgccacgtagcgataggacaattgcccgccgttggcgaagctggtttcactgcccagagtgtcacgcgcatcgatcaccgttacctcatgacctgcgcgcaccaacgcgtaggcgctggccagtccaatcaccccaccgccaataatgcacaccattcccgccgcccgtcgttgaatcaagaagcctccagcctaggggcaggtgacaggccaccgacaatgaataaagatgggctacctataaacaaaggttatggactcgccatgcgcttgcgtcatatcgaaatcttccaggccatccgccagaccggttcggtcagcgccgccgcgcaattgctgcatgtctcgcaaccggcggtgaccaaggtgttgcagcacgccgaattgcagctgggcttcccgctgttcctgcgggtgcgcggcaaattgctgcccaccccggaagcactggcgctggaacgcgaagtggagaaagtcaccgatagcctgcaaggcgtaagacgcttggccaaaagcctgcgccgtgaaccgggccagagtgtgcgcatcggcgcgatcccggcgctggcgctgtcgctgctaccgccggcgattctggagtggaaacgcgattacccggacatagcctgcgagctgtccagcgaccatagtcgcgagctggtgcagaagctgttgatgcgtgagattgatctggcgctgacgctcaatttttccggccatccggggttgaccacgcaggtgctggccaatggcgtgttggtggcattggcgtccaaaggctattggccgccagccgaactgagcaagcccttgccgttggctgacctggcgggcgcaccgctgatcggcctctccagcgccgacccgctggcggcgaagctcgacagctacctggaaaacgtcgacccaccgcccagggtaacgatctcggtgcaaacctattccctggctcgcgccatggtggaatccggggctggtttgacggtgatcgatcccttcaccgcgctgggtgcgtcaacggccaccacctgcatccgccccctcacaccgccgctgccaatcaccctgtacgccctgacccgcgccgacgaaccgccgccgcatatgttggccaatctgctggagatctttggccaccgtgccagggagcttctggagcggctataacacgtaatgcatgatcgccacaaaatgcagcaggctgccgccgatcacaaacaaatgccagatcccatgggaatgccgcaggcgatcctccaaggcaaaaaagatgatgccgacggtgtacaacaccccgcccgaggccagccagataaacccggccgtgcccaatgctgccagcagcggcttgaccgccaccaacacgatccagcccatcaccgcatagatcacgatcgacaggatgcgcgcctcggagcgcggcttgatctcctgcaagatcccgatcaccgccaacccccacacgatcccgaacagcgtccagccccatggcccgcgcagggtcaccaggcaaaacggcgtgtagctgccggcgatcaacaggtagatcgaaaagtgatcgaccttctgcatgatctcctttctgcgaccctgcacgctgtggtacacggtggacgcgctgtacagcaccatcaaggtaaagccatagatcgccacactgacgatcttccaggggctgccgtccaggctcgccaccaccaacatccacacggcgccaatacacgccgcgacagcaccgagcaaatggctccaggcgttgaatcgttccccgtggtacatgtgccgctgacctcctgtaaccgttaggactggctggcaagcgtccagccttgcgcataagagtgcaagcggcttatgacgttccggcgacgccgaagggttttgcgggcacaatcgaccgcattcgaacaagagccacggccatgctgatcgacgaagaattcaccctcaagaaactggaaatcttcctggcgttcatgcgcaccggcaacctggcccgcgccgccgccgaactgcaaaccagcaatgtgagcgtacaccgcgccatccactccctggaaaacgcgctgcgctgcccgctgttcaagcacgaagggcgcaacctcacgccgctggaaagcgcctacgtcctcgaagaacgtgcgcagaaactggtggccgacgtggtcgacagcgtacgcctgacccgcgaagccgccgggttctccgccgaacgcttcaaattgggctcgctgtattcgctgacagtgaagaccgtgccgcagctgatcatgggcctgaagatccgccgcagcgagctcaatatcgacctgatcctgggttccaacttcgacctgctctacaagctcaagaacatggaagtggatgcgatcctcatctcgctggacgagcacgccaacgacccggactgcgagcagattgcgctgttttccgacgacatcttcctcgccaccccggccgactcgcccttcgaccgcgaacagcaaatcgacctcgccgacgtgcgcgacgcaaccttcatcaccctcacccaagggttcgccacgcaccaggatggcaatcgcgtgttcaagcaggcggggttcgagccgaaggtggcgatgcaggtcaatgacatcttcacgctgctgagcatggtcagctcgggcgtgggttatgcgctgctgccgggtaggattgcggcggtgtatgagaaccgcgtgaagctcataccgctgcaacccaggtatcggttgcagcagcatatcggggtggtgttcttgaaggccaaggaaagggacccaaacctgctggcgttgctggcggagtgtcggatgtatgccaaccgccaggtgccagcctgacacaccgctatcgggggcaagccccctcccacacttgaaatgcgttccaaatgtgggagggggcttgcccccgatgaggccctgatagaccccttacccaaccaggccgcgcacaatgaaatacagcagcgaaggcccaagcaggcagcccagcccggtgtggaacgtcgccgtcagcgcgccatacggcaccaaccgccgatccgtcgccgccagccccgccgtcacaccgctgacggtgccggccaacccaccaaacaccatcgccgaacgcgggttgtccaagcccatccagcgcgccgcgaccggcgtaccgaccatgaccaggatcgccttgatcaagccggtggcaatcgacagcgccatcacatccgaggtcgcgccaatcgccgcgccggtcaccgggccgacgatgtaggtcacagcccctgcgccaatggtggtcatgctgatcgcatcgcgataaccaaacacccaggccatgctcgcaccaacgataaacggcaggatcgtgcccagcagcagcgcgatcacgccgatcatcccagccttgcgcgcctcggtggcttgcacttcgaacgccgtggcgacgatggcaaagtcgcgcagcattgccccacccatcaacccgatgccagagaacagcgccaggtccgccaggcctttctggccgccggtgatcgtaccgccgacccaggccaataccaggccgatgacgatggcaatcgccgagccatgaatgcgtccgaaggtcaggcgcttggacagcaccacggaaatccacatcaccacacccacgaaggcaaacgcggtgatcaggccgttgtgttccaggcctttttcgatgagatcccacatatcagcgacctcccactggagcaatcagcggctcttcatcgggcaacggttcgcccttgtgcgtgcggctgatcagggcaatcgtgcaaccacataccactaccgaaccgatcgcggcgagcaccgccaccgggccgccgtgcagggcggtgaccacgttttgttgcgcagccatcgccaccaccacggggatgtacatcgcgccccagaatcccacgcccatttcgcagtccttggtcatgccgccacgcttttgcatccacaggcgggcgcagatcaacaggatcatcgcgatccccaccccgcccacattggatttgacacccagcaacacgccgagcatgtcgcccatgatcacgcccgcaagcgtacagatcgccagtaatgccacaccgtagataatcattgttgttgtcctcaaagtgctcgatcgaaattgttgttgttgtgcttcgaaagccttgggcagtgctttatcggtggcggcggtcctcctcttgcagcaaggcctgcagggtgtccaggcgtgcgccttcacaggcgatcaccgtgccttgctcaaacacccgccgtgacaggccggtgagcactgcgcccggtggcagttcgatttgcaggcgcacgccgcgctcgtaggcgctttgcacggtgccgcgccagtcgacgacgcggcacatgttgaaggccaggtcgtcgcgcaattgctcggggttgtgaatcggccgtgcgcgggtgctgctcaggtaggtgatgcgcggcgccttgagcgtaccgaaggcttgggccagggcctgggccggttggtccaacaatgcgcaatgggatggcacgctgacggcgaggcgtttggcgatgccgttgcctttgatgcggtcggcgacgcgtttcatggcctggtcgctgccggcaatcacagtctggttatcggcattgatattggccagatacaccggggtttcagggctgtggacttcggccaacaggttttcgacggtggataactcggggccgatgatcgcggtcatgccgtagccctgtggataagcgttttgcatcagctcaccgcgcaggctgaccagcttgattgcctcgttgaagtccatcgcgccggcaatcaccgccgccgcgtaggcaccaatggacaggcctgcgacgtagtccggcgtgtgttgcagcaggcgggcgtgggccacgccggcgatcagcaggcaaagttgtacagcgcgggtattggccagggcctcagcagaatccaaggtgcgcacgtcttcacccaaggcatcgctggcttgttccaacacatcggccggcaacgcctggagcatgcccgagcgttgggcgccctgccctgggaacaccagaaggctgctcatgccacggcctgccagggatcaaggaccaaatgcgcaccgttggcggttttcaacagcacccgccgtgatggaccggcccattcgcgcaagacgacggcaccgaaaggcgtttgcagttgcatatccacagcgcacgcggcgttgtccaaggtggccaacaagtcgcgtgcatcgctgcgatccagcggatcgggtgtgcgcagaatcaggtccaggtcgctctgggcatgcagtgcttcaatgcccgttgccaactcaaaaccagcgctacccgtgacgccccaactcaatggcgccagcaccggccgcagttgatcaagggcttgcaatgccggtagatcccttgtcgaaaccacatcgcgcaacgcctccggcgcgacccgccgctgcacggctgccatcggcatcaacgcggcaaaccgctgctcgcgcaaacgcccacgcacacccaccgcgacaaagcccggcgtgacgatggcgcggcgcacgaccaccgtgccaaccgcatccttcgcccacgccggtgcgtcagcgggcaggtgcgccggggtcatgccccagagcaggtcgtgggcgttcaccattgctcccgcagcagttggcgcacatggctggaggcggcgcggttggacgcaccgaggcggctgctcaaatccggcgtgccgacatccttgatcgcactcaccaggcactcgttgacccgcgccacatcttgcgccgtgggctgttcgatctggctgaccgtcaaggtctcccacaacaggccgaggctggcatagctgtcgatgtcataggccatcggcggcacgctggcggccagggcttccagctcttcgacgctgcgcagggtcacccgcgccgccgaggccttgcccatggcgtgcaccatcacaccggggtcgcgcagggcgatcaggcgattggcctggtagccatgggcgaggaacgcgccggacatggctttgcccaccagcagcgcgatcaccgggtgcccggccaatcgggcacgggcatagctgtcggcggcggcagccagcgcctggtggatgccgagggcttcttcgcgccggccataggcctggctgggcacgtcgacaatggcaatgatcgggcgtttgtcgcctcgggcgatggcttcatcgacagccttcgccaaaccccaaccttcgagcaaaccgacttcgccattgcgtgcgcgggggaaacggttttgcgcgtcggtgaccacggcgataaagcgtacggcttgctcgcccagcaggccgtcggccactttcagggagttcggcaaaccctcaacgggcgttgcaccggcgctcaatgcgttgaaccactgcaaacctctcatgagcgttctccttgaaacagcgcgcgtaccgtcgccgggtcgagctgcggcgtagcatccagttcggccaggcgcgccaggtagtattcggattggcggctgcgttgctgggtgggcaggccctgttgcagcaatgcactgacggtctgttgaatctcggccacatcgtccgctacataacggtcggccaagccgctgttgaagcgctgctcgccgccggtgaggctccagatgaagggccggtcgcgggagtcatactcttcaagccccgcttcctgttcgatgacttgcggaccattcaagccaaggcgggcttcgcgggtgacgacaaggtaactgcacaaccccgcggcgatagacatgccgccaaagcaaccgacactgcccgccaccacgccgatcaccggctggtactggcgcaggtcgacaattgccgcatggatatccgcgatggccgccaggcccaggttggcttcctgcaagcgcacgccgccggtttccagcagcaacacagcgcgggttggaatacccttgcgattgtcttcggccgccagctccagagcgccggcgattttcgcgccgcccacctcgccaaggctgccgccctggaagttgccatcgatggcggcaatcaccaccggttttccaccaatgctgcccttggcgatcaccacaccgtcatcggcctggggcactacgccctggcggctcagccacggcgacatgacgcgctggaacgggtcgatcaattcgcggtaggagccggcgtccagcaaggccttggcacgctgccgagcgcccagttcaacgaagctgtgtttggcgagtaaatcagtcatgaccgacctcctcgaaaccctgctccaggcgcaagcgcaccacgccgggggtggcgccaaaatcgtggatatcaatcttcaacgccggcggggtctgctcttggaacatccgctcgaacagatgctgccagcgttgctcggcaccgttcaccgaggtctgcacctggatggtcagggtgcccggagtgcccggctccagcagcacttccaggtcgcccgagccgacgcagcccaccagtgcacggcctttcggtggctgcccggcggggaattcaaaggataaggtttccatcacaacgctccgtcgaggcggtcgataaacaggcaggcggccaacaggtcggcggcgccgccgggggaggcattcagggccagcagttgctggtccagctcatgcagttggcgacgaccggccagggttgcgctgccgccagcgtcgagcaccgcttgggcaccgtgctgcatggcttgaaggccctcggtgccggcgcggtaaagcacgcaagtgtcagccagctcggtcatgatcgcgagcaaggcatccaggcgcgcattctgttcgccggcatgctgcaggcggcttttgcgcagttgcggcaggcctcgttgtaccaccgaggggaagccgagctgcgcttcttcacgagccccgcgtgcgccgtagcgctgggcaacctgggcgccatggctcaggggttgcggagcgaagcggtcgttgagcagggccagttgggcggcggtcagcgtcacggcgcgtggttccagcgcggcggcggcggtgagcaaaccgagggcccagatcgcgccacgatgggtgttcaccccgttggtggtgataagcatcgcttgctcaccttcacggccaatgcgcccgagggcttcgcgcaggggcaagccgatttcaccgatctcaatcgccgcctcggccatttccttgaacatcggccatagcgacagcgccgaggcgtgcatcaggcccaggtgtaaatcgctgtgggcgccgttgccgcgccggtccaccagggcgggcttgggcgacaggtcggcttcatcgatcagcgcatcgacggccatgtcggccagttgatccgcaaggctgagttcatgcagtttgagggcgcgcatttaccagctcctgaatttggcgggcgggttgtacagaccaccggaccagtccaccaggtcagccacgctcttggcggccaacagttcacgagtggcgtcggtgcggcgaatccccaggtcttcaggtaaggcgatcaagccttcgcggcgcatgcgtgcagtgtccttggggttgtggcgcatgccgatggcggtgacgcctgcgacggcggcgatcatcgcctggcgctcttctagggagcgcgccttgtacaggtaggcgataccttcttcggtgagcaggtgggtgacgtcatcgccgtagatcatgatcggcgccaggggcatgccgcttttgcgtgcgacttccacggcgtcgagggtgtcgacgaaagtgggtttgccgccttcctggaaggtctcgaccatttgcaccacgagttttttaccgcgttccaacaaggcttcaggcgcatcgtcgtgacgcatgtccagccacgccggcgtaccatgacggcgaccgcgcgggtcatggcccatgttcggcgcgccaccaaacccggcaaggcggccacgggtcacggtggaggaatggccgtcgccgtcgacctgcagggtggcgccgataaacaagtccaccgcgtattgcccggcgagctggcagaacatgcggttggaacgcatcgagccgtcgcggccggtaaagaacacatccggccgtgcggcgatgtagttctccatgcccagttcggtgccgaagcaatgcacgctttcgacccagccgctttcaatcgcggggatcaacgtggggtgcgggttgagcgtccagttgcggcagatcttgcccttgaggccgagggattcgccgtaggtcggcaggatcaactcgatggcggcggtgttgaatccaatgccgtggttcagcgactgcacattgtgtttttcgtagatgccacggatcgccatcatcgccatcaacacatgcaccggcttgatgtggcgcgggtcgcgggtgaacagcggctcgatgtagaacggcttgtcggccactaccacgaagtccacccaactggcggggatgtcgacgcggggcaagtcggtaacgtcatccaccaactggttgacctgcacgatcacaatgccgtcgctgaacgcggcgggctcgatcagcgccggggtgtcttcggtgctggcaccggtgtagatgttgccggcgcggtcggccatgaaaccggcggagagcactacgttggggatcaggtccaccaccagccgcgcatagagttcgatgtaggtgtggatcgcgccgatttccagcaggccgtcttcgagcaactggctgatgcgcagggattgggtgccggcaaaggagaaatcgagcttgcgggcgatgcctttttcaaacaggtccaggtgctcggagcggccgacactgggcatgatcatgtgcaaatcgtggagcttggccgggtcggccttggccagggagcgcgagaggaaatcggcctgtttctggttgttgccttccagcaccacgcggtcgccggggaggatcaacgcctcaagcgcctcgacgatcctgtcgctgggcagcaccgcaccgtctgcgtactgtttgaccagcccgagccgccgctgcttctcgtcgcgccgccgcgtccagcgtgagtcgggggttattgttgttgtcatggtcgctccacgggtttgctgtcgtggggcttaccttaggagtgattgagggggccatcaatcaagctgggcgctggactgttacgcctgggttaatgatgcatcaataaacacgggcgttcaggtgcggtgccattcggtgtggtggaaccatacggtcctgaacaacgccaaggcggcaaaaacgtgcagccccaacacagccgcccaactccactcccacaggcctgatagcgcctgggcgtaaaccggcaacagcagcaagagcagcgccaccagcgcgcagccgcccagttgctcccagtttctcaagcgactgggacgggaggctatggcgtaacccagcagtgcacccaggcacaccaccagcaggctcagcaagtcatgctcgtcgacgggcggccagcccagcaggttgagtggcaagcacaccgcgaacacggtgaacgcgcaaatcgcgacgtacacgaaggcgtattcaagcgcatccagcagacgatcacggataaaccctcgggcctgtttgtcttcttccggggtaggtcctttggatatcgccaccgccagcagacccgagccaagaccgcccagggtcatgaccacaaagttgctcacgacgcccctgattgccttatcggcaccgatcagcttgaggctttccaggtacaccaggataaacaccgcgcctgcggtggtaatcatgaacccccacagcttcccacgattggactgcacgttcatggtcaccgctgccgtgagcaccagcacgccaaaccacatcagaagcgtgccggtaaaacggttgaggtcgtacagccaggcaaacccatccaaaagccacattgcgtcgatacttctgtcgaaaaactcccttggctatcggcagtggggtggggatctttacgaggggaaaggaacaagtgatccgcaacccgtcacaattcaccaggacgcctctcctacattttgatcgagtcatgcccactgatagccagccaacaggccctccacgtttccctgcaacgtggtcgtgctgtcaatcaactgggctaagagcggctcgtcctcatccatatacccttcgtactccgccaggttccgacgctcatgacacagcgccaacaacctcacctgcaccttgccggcacctgtggtgtgaaccaggcattgaaacaccagatagcgtttgtccgagcgatacccctgcaagcgcaaggccgtgagggcgatagcacgagccgcgttgtaagccaggtcgaaacgactggcgaatgataactgcggattgccggcatccctcagccgatccctggctgaacgcatcagcccatcacactctttgcgatccggcggctcagccttcaaaccgccgctacgttgcagattctccaggtttgccttgctgtccatccgtggattccagggggttgcccccaatcagattgatcttgtcctgctgcacgacccgctgcacaaaactgttcccgacattccatttgccgatccagtcttcaggggtgtaaagcgtcgggttgatggtgcgccccagttgctcttccagtggcatgagctgctccatgacttcactgtagttgaggctttcgccgatcaacatgagatctatgtcactggatgagtgcgcctcgcccttggcgatggaaccgtagacaaaggcccaggttatctgctcggcgaaaggtgccagtgcatcgcgcaagggctcgtccagactcagggtcttgcgcacgatagctaacaattccgagtagatagggcattggggattggcttggtaatgggtctggttgccctggcgcgtcatgttcaagatgcccgccaactgcaaccgttcaagctcacgggtgagactgcctttgcccacttgggcccagcgtgcaatttcattggtgaagaagctttggtcgggcttgccgaaaagcaggcccagcactttttgctgggtgacagtgaagagcgcagtgctgagcggcaaggtgtgcatggcagcggccaaagagtcccaaaaagggaacgataggtccctttttgggaacgatcaagttttaagcgactggagaaggggaaatctgttccaaggcacggtccaccagcaactgccccagctccgccatctgctggatgccgagcatgattgcgcgctgggaggtgtccaggtcgaaggcgaggttgcaagtgagtgcgttgagggaggacagggtttcgctggcgttgaccagcagggtttcggtgtcttggtgagggtttacggtgaagaggggcggattgggggtaggtttgatcatgatctacaactccgatatgtgatggagactgccctcttccgcttgcacgcgaattaaggtggcagctgtgcgcaggtgtgcaagaccgggcatatcggaccccggcagaccccgagggatctcccacgcacagccgccataacgagtacagcaggcataaaaaacgcccgttgaatggctatgggcgtttgtgcgccgacatgtaaccggacttgcacgtccgtgtcaccgttttttgcgatgacggggcgaagactaggcgcgctgacggcatgcgacaagttcatgcacagcccaaaatcttgcaggaaaaatccgagagcctgccgacctataacctcatgtctagtctcacagcccctaaaccttcgagcgggtaactacggtactcataaacctcacctcgaacagtgaggcggataaggcccccctgccgggtaacttgaacatccggctctttggttttcagaaaagggtgtgccgacaccaatgtcgtgagtatttcccgatcattccccagatccttgtggacgtagtacaggtaggaaaagcccaccgtagcgccaccctgattgtttcgcgcaccgtaaatggagctcccgttattcagagaatacttgagcacaacctcatccaattccggtggacctgggctcatcaaccaaccaacacccaagtacccgagacacaccaccagcagcccgttgaacaagccctggaccggccaattaatacccttgagctgtggcatattcgataccctccttgatccaatgctggtcgctgtgatcatcgccatacggcgcatcgccccaccagtctccgaactccgcccgagaagtccctgctgccttttgcgccgcaccagccgctctcaacagcacactctccggaatacccagcacagtgccggtgacgccgtagttgaagttaccgaacgcctcatactcgcgacttttctgtttgtaatcccaagggccacgccctctgacctgcgagtaaaaccacgaataggcgaaggccgaaccaggcttcaaatgcatcctgcggttgttggccaaggcgatattgtcttgcagcgaaacgcccgaaggtatgggagggacggccatttgcgaatccttgctgatggggttgagcgataaaaactagcactcaaacatcagtaaaaatacgaaggtgagacttacagaaatttcagacacgctatcagtccgagccctacctacgattgtcgtcccgacaagcaacaaagaatgttctgacagcgctttcaggttgttgctcggaacctgtgtctctagcctttccgctccgaatcgttccgcggacagacatcatgaagccgaccgttaaaaccgatgcaaggccattgcagagcgtgatgtatcacatcacaatcgtgccatgatcgtcagctggaaacacaaaggtctcagggtcttctatgagacaggctcgaccagtggaatcaacgcaaatcatgcaaagcgcttacgccgcgttctgttcattctggacaaagccgaacgtccagatgcactgaacttgcctggttggcgtttccatcggttgaatggcgacctgatcgactattggtctgtcagcattagtggtaactggcgcatcatttttcggatgttcgacgaccaagtcgaactggttgattatcttgattaccactgagtagaggtatcgatatgggcatgcacaacccccctcacccaggtgaaatcctgcttgaagatgtaatccctgccctgaacatcaccatcaccgaaatggcccggcgcctgggattcgcccgtgagacattttcgaggattttgcatgggcgtgcgcctgtcagtcctgacttggcggtgcggcttgagcgggcaggtgtgagcactgggcagttatggctgtcgatgcagagtgcctacgacttgtggcaggccgagcatcgggagcagccggtgattgagcggtttgcgcggattgattgaggtctacggattgtgggaggggcggtacgacgattcgacttgctcccgatagcagtgggtcagccaccagatgcagtgactgacagattgcaatcgggggcaagtcgaatcgtcgcaccgcccctcccacattttgatattcactgggattgagaatgagggatcaggccaggccggactctaccagcagtgcctccagcccaagcaaatccggcaccttcgccacatgctcgcccacctgcaccgccgccagttccagcgggcacagcggcacgtccacataactcaactcactgtcgagcttgtacgacctgggaatgccctggatcaccagcgcaataaacttcaacgtcggccgcccgcccaatgcattcaacaccacgatgcgcgagcgttcgccggtcacgctcgcttcgccgcacaccgcttcaaagctgatcagcgggatttgccggtcgcgccaggtcacttgccgcaggtaccacggcggagaatcgctggccggttcgccgcgctggaagtcgatcaactcggcgatggcgacattgggcagcaccaggtggcggtcggccaggggcagcagcaggccggtgagttggctggtgcggtggtcaagcatgggacttgctccagtaggcgatgctttcgagcagcaccgattcctggtacggcttgcccaggtagtcgttgacgccaatggccatggcgcggtcgcggtgtttctggccggtgcgcgaggtgatcatgatgatcggcagacgcatcagccgggggtcgttgcgcacctgggtcgccacttcgaagccgtccatgcgcggcatttcgatgtcgagcagcatcaggtccggggtgtgttcttcaagcaccgccagcgcgtcgatgccgtctttggcggtgagcacgttcatgccgttgcgctccagcaggcggctggtgactttgcgcacggtgaccgagtcgtccaccaccagcaccagcaacgggcgttttttcagcgggtcgttgaggatcagtggcgcatccaccgactgagccggcaatgccggctgccgcgcacggatatgcgccagcaagtcgatgatcaacaccacacgaccatcgcccaggatcgtcgcgccggacagcccctgcacaccggcaaactgcggccccaggcccttgaccacaatctcccgcgtaccggccatggcgtccacatggatggccacatgccgctcattgcactgcaccagcagtaccggcaccggttgatactgccccagcagtttcgggcggctgacgctgtgcagcaggtcgcccaggtagaacagctcgtaacgctggccggcgtattcataacacggcggatcttgctggtaatgcccggccagctcatggggcagtacccgcaccaggccttcgatggtattgagcgggatcgcgtattggtcgtccgcgcactgcaccatcagcgcccggttgaccgacacggtgaacggcaagcgaatgcggaaatgcacaccctcgcccggggtcgaatcaatgaccatcgagccaccgagctggcgcacttcttcatgcaccacgtccatgcccacgccgcgcccggaaatctgcgtgatcttttcagcagtggagaagcccggctgcaggatgaactgcaacacgtcacggtcgctgatctcctgattcggggccagcaggccacgcttgatcgccttacgccgcacggcttccaacggcacgccggcgccgtcgtcgcgcatgtcgaagacgatatcgccgccttcgtgggtcaggtccagggtgatgcggcctttctccggtttgccagccagcagccgtgcatcgcgggactccaggccgtggtcaacggcattgcgcagcatgtgttccaacggcgccgccatgcgctccagcacgttgcggtccatctcgccttcggcattgccgacgatgaattccacgtccttgcccagctcgcccgccacctggcgcacgatacgcttgaggcgtggcagcatgcgttcgaacggcaccatgcgcgtacgcatcaggccttcctgcaactcggtattgatgcgcgcctgttgctgcagcaggccgtgggcgtcctcgttgcggcgctccagggtgtccttgaggtcgagcaggtcggaagcggattcggacaatgcgcgggacagttgctgcaactgcgaatggcggtccatctccagcgggtcgaactcttcgtagcccaggcgctcggcctcggcctgctggcggctgaggatacggccctgggtttcggtgtcgagacgccgcagttggtcacgcatgcgttcgagggtggtttccacttccgtaagagcgatgcgtgcgtcgttgacctgctgctcgatgcggccacggaagatcgaggtttctccggccaggttgaccagatcatccagcagctcggcggagatcttcaccatgtcggcagtcgggtccacgacggcctccgccttgcccgcaggcaacgccaccggcgtcaccggctcctggctggggtgtaccaggcttttgatgcgctcgatgagcttgtccaccgagccgaccggcaagccgtccgccacggcgtcgatcatctgtgccagacggtcgtggcaaccttgcagcaacgcaaacagctcaggcgacggcgcgagcaggccggcagacaggccttcgtagagaaattccagttcgtgggccaggtcgccaatgggcgcaatctcgaccatgcgcgcgccgcccttgagcgtatgcaggtcacgcagcagggtctccacctcctggcgattgccgggctcggcctgccagcgcgacagcgccgcactggaactgtcgagaatgtcggccgcctcttcgaggaagatatccagcagttcagggtcggcgcccgacgccgctggcgcagcggccggtgcggcaggcgcgttgccttggcgcagcgcccgcaccttggcgatcagctctgcgttgtcgctcaagggttggtgatgctgcagctcttcaagctgcaaggcgaggcgctcatggctggccatcaacacctgggacaattcggcggagtaactgtagcgacggtccaccaacccttcgtacaggcattccaactcatgggccaggtcgccaatcgggccgatttcggccatgcgcgccccccctttgagggtgtgcagatcgcgctgcaatgacgacaacggcgcagcactgtcgggctctagcagccagcgcttgagcgactggccagcgctgtcgaggatgtccacggcttcttcgagaaagatctcgacgatctcgtcgtccatcgtgatttcgtgatccaactgctgggtagcggcgcccagttcggcaatgctcagcactcggctgccgtcacttttgatcaagccggtggcggacgggtcgagggcttcatccagcagttcgcgcaaggcctcgacccgcgccggcgccgggctgatttcctggccggcggccagttggtcgagcatgctgatcagcgcttcatgggcctgttcagcctcgtggaaaaaccgctcgctcaccgccaggctgctttcttctaccgccccgtacaaatccagcaaggcttcgcagagttcgtcgatggcgtgcagatccgcgacgtgcgcgccttcgcccagggtggtcagttcatccagcagtgccgtcagctcctggcgctcgccggggtgctgctgccagcggcgcagcaggctctcggcgtcgagcaggatgtccatgccttgggccaggaagttggcgatcagctgcggatcgcgcttgatgcgcacgtcgagcagcgcttcaagctgctgatccagcaggctttgcgtgcgcttgatcaggtcctctgcaccgttgatcggcgccaagggatcactgtccaggtcgcgcagcccacgctggaacaggccttcggcttccagcagcaattccacttcatccaggtccagcggcaggcggtgggccttgtattcgcgggtcaggtggtccagcgggcgtgccagttcggcgatgggcagcacgccggccatgtaggcgctgcccttgagggtgtgcagggcacgttgcagttcatcgctgacttgcagcggcacatgctcggcggcctgttgcaggaagtggttgaggctgtccaggtggctctgggcttcgttgcggaagatctccagcaacatcggatcatggggttcggcggccggcacagatgtaccactggccaaggtatgcgcgcgggcggccagggcgtcgacttcatcgcgttggcgctggtcgtcgatggcaaagtcagcaatcaattccggcagcagggccaccgcttcatccagcacctgctgcacctcggggccgagcaccacgctgcgctccagcacacggttgagcaggttttccatggcccaggccagctcggccaagaccagggcgcgcaccatacggccgctgcccttgagggtgtggaaagcgcggcgcatttcgccctgggcggttttgtccgcgctgttgggcaggtaacggtgcagcacttcgaggacttcatcggtttcttcgaggaagacttcgcgcagttcgtcgtcgatgggctcctcgtcggcgggcggcggcagcaggctgccggggcgttgcagggccggcgggttgaggcgcgacgtcggactggccagggcgtcgaattgggattggctcggcgcgagttcggccggcagtgcgccatccggtgcaaccaacgcctggcgccagggtttctcggcaggcaggtaacccagcgccgccaagccttgagtggccagctccagcacgcgctcacctgcagcatcggggtcctggagcatgcgttcgaggtagtactccaggctgctgatcacgtcggcgaaatgcgccaattgcatctcggacggtggcgcgtcgctgcccatcaactgttcgtcgacgtaatccgtgcacccgtgcatcaggctcgctgcgcgaggcaacgggatcatcgccagggcaccgcgcacctggctcagcagctcgggcagggactccaggcgctgacggtcccaatcggcttcgatgcagtcgatcaccagttccttggcttgcttgaggcactggcaggactcgcgaatcaccaattggtgaatctgggtcaggtcggtggtgggcaggcggctttcttcgcggctctccggctcgacggtgccaaccatgccggccagcgtggcttcgacgtagagcaaggcgccggcgacatccatcagcaccgcgtcgttgggctcgcgttggccctgagccaggctcagcaccacggcgagttggtcgatgatgactttgcgcggctggccgaagcccagcaccgccagggtgtcggcgatctgccgcagcggtgcgagcagtgcatccaggtcgctggtgtgttgacggtcgctgcgcacgaacaagtcgaggcgctccttgactcgtaccagttcttcgcacaaggcaccgagtaccgaccccatcgcattgcggtccggcccggccaggcgtgcgcgctcggcgtcgaccaccgcgctgtcgggcagggcttcatccaggccgtagcgttccttcaagctttgcatgcgcggcgtcggccgagtgaccttggcgacgtaaaacaacaggctcttgagcagttcatccggcgccggctggttgatcccgccgatgccttgggccagcaggcgcttgagctgtttatcactggccttgagcaggctgcgcagcgccgggctgttggcgatcacaccggtgagcataccttcgaccagcgccgaggtgacttgccacagcggcaacaacggcgcgccctggcacaaggcttcgaggcgcgcgaacacccgcgccatgtcttccaggttgctggggccgtggtcttcgcgcagcaacccggccaaggcctgttgcagcagttggtgccactggcgcagttgctctttcaggtcgggtacggcgcgttgggccagggcttcgtcgggcaacggggcgatcgtcaacagttgcggactgaacaggctggtctccgacagcaggctttcaccgcgcgcgctgcgtaggtcgttgagcaatggcaacaccaccagcggcaggtcacgccgggcgctgtgcacacggtccagatacaacggcaattggttgagggcctgttgcagcaggcggatgctttcgtcgcgctggctcacgcggtcggcttgcagcgccagggccagtgcttcgatttcctcggccagcagggccgcgccatagaactcgaccatttgcagcgcgccatgcgcttgatggacacacgccaggcactcgccgatggcatcgccgtcggaggtttcgacgtacgcatcgagcgccgaacgggcctgtttcagggtttcggcaatgtcgcccttgacccattcgagggccacgtagtcgtgccgatcaaccataactgctccgcttagaattcatgggttgctggtggtgcgaggtctcaagacagatagagatcaaatgtgggagggggcttgcccccgatggcggtgcatcagtcaaagattgggtgactgacccactgctatcgggggcaagccccctcccacattgacactgcatttcaatcatcaacctgctttgcgggcgggagggtgaaccccgacaccgaccgtcgcaactggctggccatcttcgccaaattgccgatgctttcggcggtcgccgtggagcccgacgaggtctgggtggtgatctgctggatcacgttcatggtcagggagatctgccccgccgaactcgtctgctgctgcgccgcgttggagatgctctggatcagcgccgccagggttttcgacacgccctcgatctcttccagcgccaccccggcatcctgggccagccgtgcgccgcgcaccacttcggtggtggtctgctccatggaaatcaccgcttcgttggtgtcggcctggatcgcccgcaccagggtttcaatctgccgggtcgccgccgacgagcgctcggccaggcgctgcacttcatcggccaccaccgcaaagccgcgcccggcatccccggccatgctcgcctggatcgccgcgttgagggcgaggatgttggtctggtcggcaatgtcgtcgatcaggctgacgatgtcgccaatctcctgggacgactcgcccaggcgtttgatgcgcttagcggtgtcctggatctgttcgcgaatgttgtccatgccgtggatggtgttgtgcaccacctcgttgcccttgttggcaatttccaccgagcgctccgccaccgccgaggattcggcggcgttggccgatacctggtcgatggactgggccatctggttgatcgccgttgaggcctcggcgatctgctgggcctggtgctccgaggcctgggccaggtgcatggcagtggcctgggtgtcctgcactgcaccagcgacttgcccggcggtgaggttgatggtggcgaccaggtcgcgcaactggtcgacggaatagttgatggagtcggcgatggtgccggtgaagtcttcggtcaccgaggcggtcacggtgaggtcgccgtcggccaggtcttcgatttcatccagcaggcgcatgatcgcgttctgattgcgctcgttcttctcggcggtttcatgcagttggcggttggtctcgcgcaccatcaccaggccgatcaggatgatcgaggtcagcgccagcaggcccagcacatagccgccgatggtgtcgaagctgcgcccgccggccaggttttcgaaaccggtggccaggtgcgaagcttcatcgagcagggtttgcgacaggttgaagatattgctcgccgaggcacggacctggaacagttgcggcgaggtttcgaggatttcatccacggagcctgagacaaactcgaacagctcggcgatttccgccagccgcgcgcgggcatcgcggtcttcgacctgggtaatgcgcaggccggggttgccctggagcatgccgttgagcacctggccgaagcggttggcatcgcggccgaaggcgtcggcggcctgcacggcggtttcgtcgccggccagtacggtgttcaccgcccccaggatacgctcggccagcaacgactggcgctgggccagggcgacctggctggctggggcgccgcgctgcagcagaatgtcgacgaccttttccgactccacctgcaactgcggaacggtttccgccagcgtcgccgcgacctggtgcaaggacagcacggtctgttcgctggcgaggatcgcgtcggtgtttttcagcagcgcttcccagtcggtctgcaccgcacgcatttcagcacgtaccgcactgggcgcggccggcaggccggtttccgggtcaccttttttcaggtagccccagcgctgggcgaagtcgttgcgcgcatcccccagcagcttgaacgcggcggccttgccggcagcggcttcggtggcgttcttggcgatgcgctgggacagcacgcgcagctcaccggcgtggccgatgtactgcttgtcataggtggactgggtgttgaggtacgcgaagttggcgaacagcaacatgatgaacacgatcagtgcaatgaacagcacgatgatctgggagcggctgcgtgacgcggcctggggttttggcggggtaacggtggtcatgcggcaacatccatgaagccaggggcctgggccagggcgaaggggctgaagacctgccactgcgggttgccctcgaaacgcccctggatatacggtgcaccgggagcggcactcgccagcagtgcgtcttgtgcgaaatgctgcatccccatcacctcgtccaccagcagcccgacaaacaaatcgttgaattccaccaccaatacgcgccgctgtttgcgcgccttggacaactcaaggccgaggaacccgcccaggtccatcaccggcaacaagcgcccacgcaggttagccacacccttgacccaggccttgaccccgggcatcagcgtgcagcgcggttcatgcaggacttcggcaacttcgcccatgggcgccacataccagtgctgccccaggcgaaagccgatcccgctccagcgttgcaggcgggtttcctgggacggcaggtcggcggccaacaggcgacagcggcggtcgatgtccagcagcagctcaaaggcggtttgcgactcggtcatgatggcgaaccgtcagccggccagcaccttgttcagggtggcgatcagggtttcttcatccaccggtttggtcaggtagtccttggcgccctggcgagcgccccagatcttgtcggtttcctggtccttggtggtgatgatgatgatcgggatgccgttggtttccggctccttggacagctggcgggtggcctggaagccattgaggcccggcatcacgatgtccatcagcacggcgtcgggcttttcctggcgggccagggccacaccatccgcaccgttttcggccttgaggacctggtggccatgcttttccagcatgccggtcagtttgtacatttcggtcggcgaatcgtcgacgatcagaacacgtgccatggttttccccactacataggtggacgccggcccttgtgaggcggcgtcagtgtgcttgttctactacggcgaaccccggcacgtaggccttgatcgcgcccagcagttcttccttgctgaaaggcttggtcaaaaactgatcgacacccacgatgcgccccttggccttgtcgaacaagccgtccttggacgacagcatgatcaccgggatcgacttgaacgccgggttgttcttcaccagcgcgcaggtctgatagccatccaggcgcggcatcatgatgtcgacaaaaataatgtgcgggtgatgatccacgatccgggccagggcgtcgaaaccgtcgatggccgtgatgacatcgcaccccgtgttcttcaacaaggtctcggcggtgcggcggatcgtcttcgaatcgtcgatcaccatcactctcaaggcgttggaatgctgttccatatctgctctgccatcgccacagcgaatcggttttcggtgtgtactgcctgatgttgcacaggatgaacgccacaagcctcggaattcaagggctgctgcgccgtggcagtctttttagcacagtctccgggcgcaatctatcgagcaaccggccaggtggtttttccttgacccacaacagccgcagcgccactctgacgccacttttatgcgccctaatttgctagaggaaatcccccatgagcgttcgcgtcggcattgtcatggaccctatcgccagcatttcctataaaaaggacagctcgctggccatgctcctggccgcccaggcccgcggctggacgttgttctatatggaacagcgcgatctttaccagggcgacggcgaggctcgcgcacgcatgcgtccgctgcaggtgtttgccaacccgcagaagtggttcgagctgcaagacgaagtcgacagcccgctgagcgatctggacgtgatcctgatgcgcaaggacccgccgttcgacatggagttcgtctactccacctacctgctggagcaggccgagcgcgccggcgtgctgatcgtcaacaagccgcagagcctgcgcgactgcaacgaaaagctgtttgccaccctgttcccacagtgcacgccgccgaccgtggtcagccgccgcgccgacgtgctgcgtgaattcgccgccaaacatggcgatgtgatcctcaagccgctggacggcatgggcggcacctcgatcttccgtcaccgcgcaggcgacccgaacctgtcggtgatcctggaaaccctgaccgccctgggcacccaacagatcatgggccaggcgtacctgcctgcgatcaaggacggcgacaagcgcatcctgatgattgacggcgagccggtggattactgcctggcgcgcatcccggccgccggcgagacccgtggcaacctggcagccggtggtcggggtgaagcccgccctctgtcggacaaggaccgttggattgccgcccaggttggcccgaccctgcgcgaaaaaggcctgctgttcgtgggactggatgtgatcggcgagaacctcaccgaaatcaacgtcaccagccccacctgcattcgcgagatcgacaacgcatttggcacgaacatcggcgaaatgttgatggccgccattgagcgcaagctgcaagccaagtgatatagaacagccggacacgcaccaacattgcgctatcatgccccacctgtgaaacgcgcgatgttggtttttttgtcatgacactcccgtccgaactgccccccgaactctcccacagcggcgtgcgcccggctgatcggctcggatttaccctgttcctggcggcgttgattcacttggccctgatcctcggcgtgggctttaccatggtcgaacccaagcaaatcacccagaccctagaaatcaccctcgccacgttcaagagcgaaaagaagcccgagaaggccgacttcctcgcccaggacaaccagcagggcagcggcaccctcgacaagaaagccgtgcccaagaccaccgaagtcgcgccgttccaggacaataaggtcaacaaagtcaccccgccaccggcgcccaagccggaggtcaagcaggcagcgcccaagccagccgtgaccaccatcgcccccaaaccgcagaaagccccggcccaacgcgaaaaaaccaagaccgaacccacgcccgagcccgtaaaaccggcgccgactttcgacagctcgaccctgtccgacgaaatctccagcctcgaagccgaactggccaatgaacagcagctgtacgccaagcgcccgcgcatctaccggctgaatgccgcctcgaccatgcgcgacaaaggcgcctggtataaggacgaatggcgcaagaaggtcgagcgtatcggcaacctcaattacccggaggaagcccgacgccagcagatttacggaaatttgcgtctattggtgtcaatcaaccgcgacggcacattgtatgaagtgcaggtgctggaatcgtccggccagccgctgctggaccaggccgcccagcgtatcgtgcgcctggccgcgccctttgcgccgttcagcggcgacttgaacgacgtcgaccgcctggaaatcatccgcacctggaaatttgccaagggcgatcggctgtcgagcaattgatgacaattgccgcctgtggcacatcaccagcttgtcagttcgcccctcccccgccacactagcggacatgaaaaatgtcagcccgacctacctcaagcaccacttcctgatcgccatgccccatatggccgacccgaactttgcgcaaaccttgacctacatcgtcgagcacaccgccaagggtgcgatggggttggtagttaaccgcccgcaggcgctgaatttggcggatatccttgagcaactgcgccccgagatcgacccgccggcccgttgccagggcgtgccgatctatattggtgggccggtgcagaccgatcgcggctttgtgctgcaccccaccgggccgaagttccaggccacggtcgatcttgacggcgtatcgctgtccacttcccaggacgtgttgttcgccatcgccgatggcgtgggccctgatcaaagcgtgatcaccctcggctacgcgggctgggaagccggccaactggaggcagaactggccagcaatgcctggctgacctgcccgttcgacgccgacatcctgttcaacaccgtcagcgaactgcgcctggacgcagcggcggcgacgctaggaatcaacctcaacctgctgaccagccaggcggggcacgcctgatggctttgcgtctgatccttggctttgactacggcaccaaacagatcggcgtagcggtcggccaggtgatcaccggccaggcccgcgagttgtgtaccttgaaagcccagaatggcgtgccggactggaaccaggtcgaggccctcataaaagagtggaagcccgacgcggtcgtggtcgggctacccctgaacatggacggcacccccagcgacatgtgcctgcgcgccgaaaaattcgcccgccgactcaatggccgctacaacctgcccttctatacccacgacgaacgcctcaccacctttgaagccaagggcgagcgccgtgaccgtggcggacaaaagggcagctaccgcgacaacccggtagacgccatcgccgccgccctgctgttgcagggctggctggatgaaaacaccgctttatttgaatcctgactgacgcggcttgccgcgtctttttacgtttgagcccggtccttgcctgcgcgaggcctagaaggagcccccatgagcctgccgaaccccgccgaactgatcagccagatggccaccagcctcacggcccatctgcaacaccgcaacatcagcgagccacgcttcatcggcattcgcaccggcggtgtgtgggtggcccaggcgctgctggaagcactgggcagcgagtcgcccctgggcaccttggacgtgtccttctaccgcgacgacttcagccagaacggcctgcacccgcaagtgcgcccgtcggccctgccgttcgagatcgaaggccagcacctggtgctgatcgacgacgtattgatgagcggccgcaccatccgcgccgccatgaacgaactgttcgactacggccgcccggccagcgtgaccctggtgtgcctgctggacctggacgccggcgaattgccgatcagcccggacgtagtcggcgccaccctgtcgcttgaagcccatcaacgggtaaaattgctcggtcccacgccgctcgtactcgaactgcaagacctcgccctttaaaccgccttgtaaagagtccccgcgatgacgcctctagatgccaagcgcccgctgcagctcaatgctcagggccagttgcaacacttcttgtccctcgacggtttgccccgcgaactgctcaccgaaatcctcgacaccgccgactcgtttctcgaagtcggtggccgggcggtgaagaaggtcccgctgttgcgcggcaagaccatctgcaacgtgttcttcgagaactccacccgcacccgcaccaccttcgaactggcggcccagcggctgtcggccgacgtgatcacgctgaacgtgtccacctcatcggcaagcaagggcgaaaccctgctcgacaccctgcgcaacctggaagccatggccgccgacatgttcgtggtacgccacggcgactccggcgctgcacacttcatcgccgagcatgtgtgcccgcaggtggcgatcatcaacggcggtgacggccgccacgcccacccgacccaaggcatgctcgacatgctcaccatccgtcggcacaagggcagctttgaaaacctctcggtggcgatcgtcggcgacatcctgcactcgcgggtcgcgcgctcgaacatgctggccctcaaagccctgggttgcccggatatccgcgtgatcgcgccgaaaaccctgctgcccatcggtatcgaacagtacggcgtgaaggtctacaccgacatggctgcaggcctgaaggacgtggacgtggtgatcatgctgcgcctgcaacgcgagcgcatgaccggtggcctgctgccgagcgaaggcgagttcttccgcctgttcggcctgaccaccgcacgcctggccggcgccaagccggatgccatcgtgatgcaccctggcccgatcaaccgtggcgtggagattgagtcggcggtggccgacggtccgcagtcggtgatcctcaaccaggtgacctacggcatcgccgtacgcatggccgtgctgtccatggccatgagcgggcaaaccgcgcaacgtcaattcgagcaggagaacgcccagtgaagctcagcatcctcggcgcccgcgtcatcgatccggccagtggcctggatcaagttaccgatctgcatctggaagccggcaagatcattgccattggcgcggcgcccgcaggcttcaacgccagcgagaccatcgacgccaaaggcctggtggccgcgcctggcctggtcgacctgaacgtcgcactgcgcgagccgggttacagccgcaagggcaacatcaccagcgaaacccgcgccgccgccgccggtggcgtgactagcctgtgctgcccaccgcacaccaagccggtgctggacacctcggcggtgactgagctgatcctcgaccgcgcccgtgaagccggcaactgcaaagtgttcccaatcggcgcactgagcaagggcctggaaggcgaacaactcgccgagctgatcgccctgcgcgacgccggttgcgtggccttcggcaacggtctggaaagctttcgcagcacccgcacgctgttacgtgccctggagtacgcggccactttcgacctgacggtgatcttccattcccaggaccgtgaccttgccgaaggcggcctggcccatgaaggcgccgtggccagcttcctcggcctgccgggcatcccggaaaccgccgagaccgtggccctggcccgtgacctgctgctggtggaacaaagcggcgtgcgcgcgcacttcagccagttgaccagtgcgcggggcgtggccttgatcgcccaggcgcaggcccgtggcttgccggtgacggcggatgtggcgttgtaccaactgattctgacggacgaagcgctgatcgacttctccagcctgtaccacgtgcaaccgcccctgcgcaccctggccgaccgcgacggtttgcgcgcagcggtgaaatccggtgtggtctcggcgatttccagccatcaccagccccatgaacgggatgccaagctggcaccgtttggcgcgacagagccgggtatcagcagtgttgaactgttgctgccgctggcgatgacgctggtagaggatgggttgctggacttgccgacattgttggcacgcttgagcagcggcccagccgaggccctgcgtctgccggcgggcaagttggcggtgggttcggcggcggatctggtgctgtttgatccggccagctccacggttgccggggaacactggctgtccaggggtgaaaactgcccgttcatcggccatagcctgccggcgacggtgcgttacaccctggtggatggacgtatcacctaccaggcctgatagacatccaatgtgggagggggcttgcccccgatagcggtagatcagtcagcttatctgtagctgacccactgcaatcgggggcaagccccctcccacatgttgatctccaccagaagttaaagatcagcgaccgctgttgcgctcggcattgcggatcgatatctgcgtattcaacgtccagaagtcatacagcacccccaccaggaacaaaccgccggtcagcaggtagatcaggccggagatccatttgccctggtacatgcggtgcacgccaaacaccccgagaaacgccagcagaatccaggccacgttgtattcgataggcccggcggtaaatcgcaggtccgcttcacggtccatggccgggatcaggaacaggtcgatcagccagccgatacccagcaagccaaaggtgaaaaaccagatcgtaccggtcaccggcttgccgtaatagaagcggtgcgctccggtaaaaccgaaaatccacagcaggtaaccgatcaccttgctgtgggtgtcttgctgctcgccaatctgctgataggtgttcatcgcgtacctcttttgcctcgatagataaattttttcattttctttgtgacttttttacgggcgcccgacgtacggcaaatggtatcttccctgccctgaaagccttatgccacctgacttgtgtaggacaattgcggcgaatcgtcgcgtttttcctgattttgacgtcaaggttcagtcgacaaacggcctgagaacgacacaaaaagctgttataaagttgcgcgcaaacccataagagccacgcctaatgcgaccatttttcaagacatggctaaccatttgcctattaatgccactggccgcccacgccaccaatcgtgagcaacgacttcccaacgttaacggtttcacccctaaagtccacagcacgccaagcaccgccaagtcggtcaagctgaccgtcaaccgcccgactcaactgagcaaggcccacggtaaagccacggccggcctggtaggcgtcaacaccaagcagagcagcaccgtgcttagccgcgccgtcaacgtgctcggtactccttatcgttggggcggcagcagcccaagtaaagggttcgactgcagcggtttggtgaaatatgcgttcaacgacgtcgccgctgtggatttgccgcgcacttccaacgccatggccgctggccacgggcagaaggttgatcgcaaggacctgaaaccgggtgacctgctgttcttcaaactgaagagtcgccaggttaaccacgttgccatctacctgggcaacgaccgcttcatccacgcaccgcgccgtggcaaagcggtcagcatcgacacgctgaaaaagccgttctgggacaagaactacgtgattgccaagcgggtgctgcctaaagagcagaacaacctgcgggtcgtgcagcgctgattccaggctggaatgcgataaacaatgtgggagggggcttgcccccgattacagtgggtcagctacaaataagctaactgatccactgctatcggaggcaagccctctccctcatttggagcttcatatatccccaggcaccctcgccttctgctgcgcctcttcccgactgatcaccccctccccgaccaacgccctcaagctcatatccagcgtcttcatccccaacgccccaccggtctgtatggccgagaccatctgcgccaccttgtcctcacggatcagattgcggatagccggcgtgcccagcatgatttcatgggccgccacacgcccgccgccgatcttcctcaccagcacctgggacaccaccgcctgcaacgactccgacagcatcgagcggatcatggccttttcccccgccggaaacacgtccaccagccgatccacggtctttgccgccgacgaggtgtgcaaggtgccgaacaccaggtgcccggtctcagccgccgtcagggccaggcggatggtttccaagtcgcgcagttcacccaccaggatcacgtccgggtcttcccggagcgccgagcgcagggcaacggaaaagctgtgggtatcgcggtgcacctggcgttgattgatcaacgccattttcggcgtgtggataaattcgatggggtcttccagggtcaggatgtgctggcgccgatgccgattgagaaaatcgatcatcgccgccagggtggtggacttgcccgagccggtggggccggtcaccagtaccaggccgcgcggcagttgggcaatacgctggaatacttcccccaggccgaggcgctccaggctttggacctcggacgggatggcacgaaacaccgcgcccatgccacggtcctgccggaacacattggcgcggaaccgcgcgacaccgggcagctcgaaggcaaaatccgtttcaagagatgtttcgaaatccttttgttggtgctgattgagcaatgggctcaacaagtccgccacttgcgggggtgaaagcaccggcccatccagcggccagacctcgccatccacccgcagcatcggcgccaggccggcggacaaatgcaggtcggaggcgccacggcacacgctggccgtgagtaattcagtgatatccatagggctttccatttccagtagaatgccgcggactccatatccacgggcgcatcttgaatgtcgacgatagcagacaacatcggccaggttagccagcgcatccgcgccgctgccgacgccgtgcaacgtgacgcaagcagcatccacctgctggccgtgagcaagaccaaacccgcgcaggcagtgcgcgaagcctatgccgccggcatgcgcgactttggcgagaactatctgcaggaagccctgggcaaacaggccgaattaaccgacctgcccttgagttggcacttcatcggccccattcaatcgaacaagacgcgcgctatcgccgagaacttcgcctgggtgcattccgtggatcgcctcaaaattgcacaacgcctgtccgaacaacgcccggccgacctgccaccgctgaacatctgcatccaggtcaacgtcagcggcgaagccagcaagtccggctgtacacccgccgacctgccagccctggccaacgctatcagcgccctgccgcgcctgaagctgcgtggcctgatggcaatccccgagccgaccgaagagcgcgccgcgcaagacgcagccttcgccaccgtgcgcgagctacaagccagtttgaacctggcgctggacacactttccatgggcatgagccacgaccttgagtcggccattgcccaaggcgccacctgggtgcggatcggtaccgccctgtttggcgcccgcgactacggccagccatgaaatggctgacttccatttagctaaggacctgtcatgagagacacgcgtatagcctttatcggcgccggtaacatggcggccagcctgatcggtggcctgcgggccaagggcctggatgccgcgcagatccgcgccagcgacccgggtgccgacacccgtgcccgcgtcagcgccgagcacggtattgaaacctttgccgacaacgccgaggccatccagggcgtcgatgtaattgtgctggcggtgaagccgcaggccatgaaggccgtgtgcgaaagcctgcgtccaagcctgcagccgcagcaactggtggtgtccatcgccgccggcatcacctgcgccagcatgaacacctggctcggcgcccagccgatcgtgcgctgcatgcccaacacccctgccctggtcagccaaggcgtgagcggcttgtacgccaccgccgaagtgagcgccgaacaacgcgaccaggcgcaagagctgctgtccgccgtgggcctcgccctgtggctggagcaggaacagcaactggacgcggtcaccgccgtatccggcagcggcccggcgtatttcttcctcctgatcgaagccatgaccgccgccggcgtgaagctgggcctatccaaggacgttgccgaacaactggccgagcagaccgccctgggtgctgcgcgcatggcggtgtccagcgatgtggatgccgccgagctgcgccgccgcgtgacctcgccgggcggcaccacacaggcggccatcgagtcgttccaggccgggggctttgaagccctggtggaaaaagcattgggtgccgctgcgcaccgctcggcggaactcgccgaacaactgggcaaataaggagccaacatgattggtttgaataccgcagccgtctacgtgctgcaaaccctcggcagcctctacctgctgatcgtcctgatgcgcttcgtactgcaactggtgcgtgcgaacttctacaacccgctgtgccagttcatcgtcaaggccacccaaccgctgctcaagccgttgcgccggatcatcccgagcctgttcggcctggacatgtcgtcgctggtactggcgatcctggtgcagttggccttgatggcgctgaccctgctgctgacctacggcaccaccggcaacttcgtacagttgctgatctgggccatcatcggcgtgaccgcgctgttcttgaagatcttcttcttcgccctgatcatcagtgtgatcctgtcctgggtcgcccccggtagccacaaccctggcgccgagctggtgaaccagatctgcgagccggccctggcgccgttccgccgcctgctgccaaacctgggcggcctggatatctcgccgatcctggcgttcatggtgctcaagttgctggacatgctggtgatcaacaacctggcggccatgaccgggatgccggagattttgcgtctgctgatctgacgcaaagcaaatgtgagaggggcggtacgacgattcggcttgcccccgataacggtgtaccagccaccatttgtagtgactgacagactgctatcgggggcaagccccctcccacatttcaaaccgctcaggccattgcttgccgctaggtgcagcggtctttagacttacgcctcatttaaacgagagcagggtcgatgccagctgcctttccccccgattctgttggactggtcgtgccccaagtggcgcacttcagcgaaccactggccctggcctgcggccgttcgctgcccgcctacgacctgatctatgaaacctatggccaactgaacgccacggcgagcaacgccgtgctgatctgccatgccttgtccggccatcatcacgcagccggtttccattcggtcgacgagcgcaaacccggctggtgggacagttgcatcggccccggcaagcccatcgacaccaacaagttctttgtggtcagcctgaacaacctcggcggctgcaacggctcaaccggccccagcagcctcaacccggaaaccggcaagccattcggcgccgacttcccggtgctcaccgtggaagactgggtgcatagccaagcgcgcctggccgaccggctgggcatcagccagtgggctgcggtgatcggcggcagcctgggcggcatgcaggcactgcaatggaccatcacctacccggaccgcgtgcgccactgcctggcaatcgcctcggcccccaagctgtcggcgcagaacatcgccttcaacgaagtggcgcgccaggccatcctcaccgacccggagttccacggtggttcgttccaggaagccggcgtgattcccaagcgcggcctgatgctggcgcggatggtcgggcatatcacctacctgtccgatgactccatgggcgagaaattcggccgtggcctcaagagcgagaaactcaactacgacttccacagcgtcgagttccaggtggaaagctacctgcgctaccagggcgaggagttctcggggcgtttcgatgccaacacctacctgctgatgaccaaggcgctggactacttcgacccggccgcccaccacgacgacgacctggcgaaaaccttcgaaggcgccacggccaagttctgcgtgatgtcgttcaccaccgactggcgcttctcgccggcccgctcccgcgagctggtggacgcgctgatggcggcacgcaaagacgtctgctacctggagatcgatgcaccgcaaggccacgacgccttcctgatcccgatcccgcgttacttgcaggcgttcggcaattacatgaaccggattactgtgtgagaacgccatgagagccgacctggaaatcatccaagactggatccccgccggcagccgcgtgctcgacctgggctgcggcgatggcgaactgctgagctggctgcgcgacaacaagcaagtcaccggctacggcctggaaaacgactcggacaacatcgcccagtgcgtggccaagggcatcaacgtgatcgagcaggacctggacaagggcctgggcaactttgccagcaacagcttcgacatcgtggtgatgacccaggcgctgcaggcggtgcactacccggaccgcatcctcgacgaaatgctgcgtgtaggccgccagtgcatcatcaccttccccaacttcgggcactggcgctgccgctggtacctggccaccaagggccgcatgccggtgtcggacttcctgccgtacacctggtacaacacgccgaacatccacttctgcaccttcgaagacttcgaagccctgtgcagtgagcgtgaagccaaggtgatcaaccgtcttgccgtcgatcaacagcatcgtcacggctgggcgagtaaactatggcccaatctgttgggcgaaatcggtatctaccgggtcagcagtcctggcctgacggaccacaagattgccgtctaatcatcttcaagagggacgctcatgagtcgtttggctatttttctattgaccgcctgcctgggcgccaacgccatggccgcggacgctatagacgctaaccgcaagaaagacttcggcgatatcaccgtccactacaacacgttcacctccagcttcctgcaaccggaaaccgcccaggccgtcggcgtggtgcgcagcaaggagaagggcctgatcaacgtgaccgtgatcaagggcgtgaccccggtggccgcgcaagtgaccggcaccatcaaggacttgggcggcaagagcgaagtcctcaccttcaaacagatcaacgagaaaggcggcatcaattacctggcgccctactccgtgacgcagcgcgaatacaagacgtttaccatcaacgttgaaaccggcggcaaagcccatagcttccagttcaaccaggaactgtttccggcggaataatgaacctcacccaactcgtactggccagccataacgccggcaaactcaaagaactgcaagccatgctcggtgactccgtgcaactgcgctccatcggcgagttcagccaggtggagccggaagagaccggcctgtcgttcgtcgagaacgctatcctcaaggcgcgcaacgccgcacgtatctccggtttgccggcgctggcggatgactcggggctggcggtggacttcctcggcggcgcgcctggcatctattcggcacgctacgccgacggcaaaggcgatgcagccaacaacgccaagctgctggacgcgctcaaggacgtaccggacgccgaacgcggcgctcagttcgtctgcgtgctggccctggtgcggcacgccgatgacccgctgccgatcctctgcgaaggcctgtggcacgggcgcatcctgcatgccgccagcggcgagcatgggtttggctatgacccgctgttctgggtgccggagcgtaacgtttccagtgccgaactgagcccggccgacaagaaccagatcagccaccgtgctcgcgcaatggatttgctgcgccaacgcctgagcctgaaatgacccagaacacctctgcgcagccgctgatccacggcggcgcgcaaacacctcgggcggccttgcctgtgctgccgcccctggcgctgtacatccacatcccgtggtgcgtgcgcaaatgcccttattgcgacttcaactcccacaccgccagcaaagtgctgccggaagaagagtatgtggacgcgctgctggcggaccttgatcaggacctgcacgccgtgtatggccgtgagctgagttcgatcttcttcggcggcggtacgccaagcctgttcagcgccgcagcgctggggcggctgctcaagggtgtggaagcacgcatcccgtttgccggcgatatcgagatcaccctggaagccaaccccgggacgttcgagcaagaaaagttcgtggcctatcgcaagctggggatcaatcgcctgtccatcggcatccagagcttccagcaggcaaagcttgaggccctcggccgtatccacaatggcgacgaagccgtacgcgccgccggcatggcgcgccaggctggctttgataacttcaacctggacttgatgcacgggctgcccgatcagtccctggacgatgccttgagcgacctgcgccaggccatcgctttgaagccgacgcacttgtcctggtaccaactgaccctagaacccaacaccgtgttctggaaccagccacctgcgctgccggaagacgacaccctgtgggacatccaggaagccggccaggcgctgctcgccgagcacggttacgcgcaatatgaagtgtcggcgtatgcccaaccgggtcgcccggcgcggcataacctcaattactggagcttcggtgactttatcggcatcggcgccggcgcccacggcaagctcagccacccggacgggcgcatcgtgcgcacttggaagacgcgggcaccgaaggactacctcaacccggccaaaagcttccaggccggcgcgaaggaactgaccaacgaagagctgccattcgagttcctgatgaacgccctgcgcctcaccgaaggcgtcgatgccaggctctacgccgagcgtaccggtctcgatctggcgagcctcgatgaaggccgccgcgaggcagaacaaagtggcttaatgcaggtcgaaccgtcacgcctggcggcgaccgaccgcgggcaactctttctcaatgatctgttgcagaagtttttgagctgacgctcttaaggaaatcgaatggatttggtactcgacctgctcgccaccgtgtcccgctggagccgtagcaacctgtcggaaatctccctggccctggtgggctgcctgttggtgctgtttggcgccgacatcaagggctggatcgaagcacgcctgggcagcatcgcgggtgcgttgcgcgtgccgttgatggcgctggtgtgcatgatcggcagcggcgcggcgttgatttatgccacgccgtggattgtgcgggggttgagccagttcaataactacagcctggcgccggtgttgattgtcgtactggtgttgatcggcgtagtcgcagaccgccgctgatcctgagcaaaacgtcgatacaaatgtgggagggggcttgcccccgatggcggtggaccagtcactctatggggtgactgacactctgctatcgggggcaagcgccctcccacatttgattgcattgcaactcagaggcgagttacgccagcttctcgaacttcaaatcccacaccccatgccccagccgctcaccacgacgctcgaacttggtaatcggacgctcggccgggcgtggcacgcatttgccgttttcagccaggttgcggtagccaggggccacgttcatcacttccagcatgtattccgcatacggctcccaatcggtggccatgtgcaggatgccgcccactttcagcttggtgcgcaccagttccgcaaaggaggcctggacgatgcggcgcttgtggtgacgggctttgtgccatgggtccgggaagaacagcatcagacggtcgaggctgttgtcggcgatgcagcggttgagcacttcgatcgcgtcgcaatcgtagacccgcaggttggtcaggccttgggtcaacacgccgttgagcagcgcgccgacacctggccggtggacttcaacgccgatgaagtcctggtccggcgcagcggcggccatttccagcagggagtggcccatgccgaaaccgatttccagggaacgcggggccgaacggccaaacacctggtcgtagtccaccggcgcgtcggccaatggcaacacgaacaacggcgtaccttgctccaggcccttttgctggccttcggtcatacgaccggcgcgcatcacaaaagtcttgatgcggcggtgcttggactcgtcgcctgcttccagggtgttcggcgtttcgtttgattcagtcatcaatggctcttacttgatcagaccatccagcggcgaggaggcgctggcgtagagttttttcggcatgcggccggcgaggtaggccaggcggcccgcgacgatggcgtggttcatggcttcggccatcaggatcggttgctgggcgtgggcgatggccgagttcatcagcaccgcatcgcagcccagttccatggcgatggttgcgtcggaggccgtgcccacgcccgcatccaccagcaccgggatcttggcttcttcgaggatgatctgcaggttgtagggattgcagatacccaggccggaaccgatcaggccggccagtggcatcaccgcgatgcagccgatttccgccagttggcgcgcaatgatcgggtcatcgctggtgtagaccatcacgtcgaaaccttccttgaccagggtttcggcggccttgagggtttcgatcacgttggggaacagggttttctggtcggccagcacttccagcttcacaaggttgtggccatcgagcagctcacgggccaggcggcaggtgcgcacggcttcaatggcgtcgtagcaaccggcggtgttcggcaggaaggtgtagcggtccggcgacagcacttcgagcaggtttggctcgccttcgatctggccgaggttggtgcggcgcacggcgaaagtgacgatctcggcgcccgaggcttcgatggccaggcgggtttcttccatgtcgcggtacttgccggtgccgaccagcaggcgggactggtaggtacagccggccaggacgaaaggcttgtcgctacgaacgatgctcatgggaaatcctcgaaatggggtgaggttctgcagaattcaggaagctgcgcgatcagccgccgccgatggcgtggaccacttcgacctggtcgccttcggcgagcgcggtctcggcgtgcaggctacgcgggacgatatccaggttgagttccactgcgacgcgacgcccggtcaggtccaggcgggtcagcagggccgcaacggtttcaccgtcgggcagttcaaaggattcgccgttcaactgaatgcgcatgccacgggccgtcatcgtttttaggggtcggcattctagcccgattgaggttgccggcccaagtcccttggtcaggctgcctgcaaacgccacgccgccaggcccaggaagaaccagccgagcaggaaggcaaggccgccaaacggcgtgatgatcccgagtttgctgatgccggtcagggtcagcacatacaggctgccggagaacagcaggatgccgacggtaaacgagatgcccgcccagctgaccaatcggccaggaatatgcgccgccagcagcgccacgccgaacagtgccagggcgtgcaccaactggtaggtcacgccggtgtggaagatcgccaggtactcagcgctcaggcggtttttcaggccgtgggcggcgaaggcgccaagggcgacaccggtgaagccgaaaaaggcagccaacatcagaaagccacgcagcatgaggaactccagtcagactcatagggcagggtctgtataatggcccgctcaacgggttcggccaagccatctctatgctgcgtctcctcttcaaacgctttctcaacgtcgtcaaatggtttgccatcggcagtgtgctgctggtgctgctgtttcgtgtcgtcccgccgcccttcaccgcgctgatggtggagcgcaaggtcgaatcctggttcgacggcgagcccattgacctgcagcgcacctgggtgccgtgggacgagatctccgatgacctcaaagtggcggtgatggctggcgaagaccaacgcttcccgcagcattggggctttgatttcggcgcgatccaggcggcgatcctgcacaacgagcgcggcggctcgattcgcggtgccagcacgttgagccagcaagtgtcgaagaacctgtttctgtgggccggccgcagttatctgcgcaaaggcctggaagcctggtttaccgggttgatcgaggtgttgtggcccaagcagcggattcttgaggtgtacctcaatagcgtggagtgggacgaaggggtatttggggcggaagcggcggcgcggcatcactttggggtgagtgccaaggggttatcgcggcagcaggccagctatctggcggctgttttgcccaacccacgggtgtggagtgccagtcatccgacggcgtatgtggcgcggcgcgctgcttggattcggcagcagatgggtcagttgggtggagacggttacctggttgaactgaacaactcccgcaaggccccctggtccgactgacacaacaaaaacaaatgtgggagggggcttgcccccgatagcgatggaacagtcaccttgatgttgactgacactctgctatcgggggcaagccccctcccatatttttaggctgcgatggacagtttcagcttgttcatcgcgcttttctcaagctgacgaatccgctcggccgacacgttgtacttctgcgccaggtcatgcagcgtggccttgtcttccgccagccagcgctggtagaggatgtcacggctgcggtcgtccagcacttccagcgcttcatgcaggttgtggttggagttgtcgctccagtccgcatcctccagttgacgcgccgggtcgtagcgatggtcttccaggtagttggccggcgattggaaggcgctgtcgtcgtccgcttcagcagcggggtcgaaggccatgtcatggccggtcaggcggctttccatctcgcgcacttcacgcggctccacgccgaggctttcggccacgcggtgcacttcctcgttgttcagccacgccaggcgtttcttctggctgcgcaggttgaagaacagtttgcgctgggccttggtggtcgccactttcacgatgcgccagttgcgcaggatgaattcgtggatttccgccttgatccagtgcacggcaaacgacaccaggcgcacacccatctcggggttgaagcgctttaccgccttcatcaggccgacgttgccttcctggatcaggtcagcctgggccaggccgtagccgctatagctacgggcgatatgtacgacaaaacgcaggtgggcgagcaccatctgccgagccgcccccaaatcctgctcatagtagagactctcggccagttcacgctcctgctcgggcgtcagcaatggaatgctgttgaccgtgtgcacataggcttccaggttcgcacccgggaccaaggcataagcaggttgcaaagaagtggtcatacgaaaaaacctccgactcacataactcgtgcagtgaagcactgcgaaaattgaccgggaaccgtaggacaagttccctaaaccaccaatacggtcaatacaaacgaaaccacattaatctgacattaactacttcggtgccagctcacgtaaatgacgagcgaccgcaatccacgcaccgatataccccaacaataccgcgccaagcaagagactcagaccatcggctaccggcacgccggccagggcgaaatcactgccgtagagtccggcaagcccgacaaccgcgtcgttcagccagtccaggccaaaagccagcacgccccaggacaaaatcccggcaccgaagccataaagcgcgcccatgtacagaaaaggacgacgcacatagctgtccgtgccgccgaccagtttaatcacttctatctcggtgcgacggttttcaatatgaagacgaatggtattacctatcaccaaaagtaatgcagacaccaacagcaccgtcaggccgaacacaaaccggtcgcccagcttgaggatcgccgccaggcgctctacccagactagatcaagctgcgcctgctgtaccttgggcatctctgcgagtttttgtcgcagggcctccagcgccggcttatcgacttcgttcggcgtcaccagcaccacgcccggcagcgggttctgtggcagctccttgagcgcctcgcccaggccggactgttgctggaactcttccagcgcctgatcgcggctgatgtactcggcatccgccacgccggggatgttcttgatgtcgtcgcgtaacgcttcgccatctttggcactggcgtcgatattcaggtacagcgaaatctgcgctgcgcgctgccaggaaccgcccaggcgctccacattattaagcagcagcgacaaacccatcggcaggctcagggccaccgccatcaccaggcaggtgaaaaagctgccgatcggctgtttgcccaggcggcgcaggctgtcgaccaggctggcgcgatggctctcgatccaggcgcgcagcaaggtgctgaaatccggaccgtcgtcatcatgctcgtgttttttcttcggcggttgcgggtcggccggtttcggcgccacgcgttcggagactttagggctgcgtgttgcactcatacgccggcctccccgtcaccgatcaggcggccgcgttgcagggtcagcatgcgatggcgcatgcgtgcgatcagtgccaggtcgtgactggcgatcagcacgctggtgcccaggcggttgatgtcttcgaatacgcccatgatttcggccgccaggcgcgggtcaaggttaccggtgggttcgtccgccagcagcagcgccgggcggtggacgatggcgcgggcgataccgacgcgctgttgctggccggtggagaggtcgccggggtacaggtcggtcttgtccgacaacgccacgcgctccagggccgaatccacgcgcttgacgatctcggccttggacagcccgaggatctgcaacggcagcgccacgttattgaacacggtgcgatcaaacaacagctggtgattctggaacaccacgccgatctggcggcgcaggaatggaatctgcgcattgctgatggtggccaagtcctgacccgccagcagcaacttgccagtggtcgggcgttccatggccagcagcagccgcaacaaggtacttttgccggcgccggagtgcccggttacaaatagaaactcgccgcgccgtactcgaaagctcagctcatgcaagccgacatgcccgttggcatagcgtttaccgacctgttcgaatcgaatcatgaacgctcccgctcggcaaacagtgcctgtacaaagggttcggcttcaaaggtgcgcagatcgtcgatgccttcaccaacgccgatataacgaatcggcaacccgaactgtttggccagggcgaagatcacaccgcccttggccgtgccgtcgagcttagtcaatgccaggccggtcagttgtaccgtctggttgaattgtttggcctggctgatggcgttctggccggtgccggcatccagcaccagcaggacctcgtgcggcgcgtctgcgtcgagcttgccgatcacccggcgaacctttttcagctcttccatcaaattgtctttggtgtgcaggcgaccggcggtatcagcgatcagcacgtcgatgttacgggccttggcggcctgcacggcatcgaagatcaccgaagcggaatcggcgccggtgtgctgggcgatgaccgggatcttgttgcgctcgccccacacctgcagctgttccaccgcagcggcacggaaggtatcgccggctgccagcatgactttcttgccttcggactgcagcttcttggccagcttgccgatagtggtggtcttgccggcaccgttgacgcccaccaccaggatcacgaaaggcttcttcggggtgatcaccagcggcgcttccaccggcttgagcatcgcggccagctcggcctgcagggatttgtacaacgcgtcggcgtcggtcagctgcttgcgcgcgaccttctgggtgaggctctggatgatcacggcagtggcttcaacgcccacgtcggcggtgagcaggcgggtttcgatgtcttccagcagttcgtcatcgatgaccttcttgccgaggaacaggctggccatgccttcgccgatactggcgctggttttgctcaggccttgcttgaggcgggcgaagaagccggtcttgctggtttcggcaggggcgacgacgggctccggctcgacaaccgcaggcacggccacctcggccacagccggaatcggcggggcgatgtgctcagcctgcacatcttcgaccagcgccacgggctcttcagccaccggcagttccggccacggtttgtgctcgggttccggctcaggttccgggaccgcctcgacgaccggctgcaacaccggctcggccatcggcaacaccaccggcgccggggtttcggcaaccggttcggcttctactatgggttctgggataggttcaggcagaacctgcggctgttcgtcgacggtttcctgcggctttttgcgcagccatccgaacaggcctttcttctcgccagccgcagctggggtcttcttgtcgtcgttggaaccaaacatggagacggctatctcaaggtagcgacgcgccaaggggcgcgtcggtaaataaaattcgatgcgtaacagactgttttttagccagctcgttcatgcgcaacattttgtaaggcctaaatagggcctaaacaagactgccgcagtggccgtccgtaaatccgaccagtatcctagcacctcctcgcccgccgacgctaagaccaagcgggcagcccaacaggtttaaaaacgaatgaatgctctagcccgccgcgccgcaggcctgctgttcagcacagtttgtctgcctctttcagccatggctgccgacccacaacccacccatgaattcaccctggacaacggcctcaaggtggtcgtacgcgaagaccatcgcgcgccggtggtggtttcccaggtctggtacaaggtcggttcgagctacgaaaccccgggccagaccggtttgtcccacgccctggaacacatgatgttcaagggcagcgccaaggtcggccccggcgaagcctcgctgatccttcgcgacctgggcgccgaagagaacgccttcaccagcgatgactacaccgcttattaccaggtgctggcccgtgatcggctgggcgttgccttcgagctggaagccgaccgcatggccagcctgcgcctgccggccgacgaattcagccgcgaaatcgaggtaatcaaggaagagcgccgcctgcgcaccgacgacaacccgatgtccaaggcctacgagcgcttcaaggccatggccttcccggccagcggctaccacacgccgaccatcggttggatggccgacctggaccgcatgaaagtcgaagagctgcgccactggtaccaatcctggtacgtcccgaacaacgccaccctggtggtagtcggcgatgtcaccccggacgaggtgaagaacctggccaagcgctacttcggcccgatccccaagcgtgatgtgccaccggccaagatcccgatggaactggccgagcccggcgagcgcctgctgacgatgcatgtgaaaacccaattgccgagcgtgatgctgggctttaacgtgccgggcctggccaccgccgaagacaaacgttcggtgcaggccctgcgcctgatctcggccttgctggacggcggctacagcgcccgcatctcagaacagttggagcgtggtgaagagctggtttccgccgcctccaccaactacgacgcctacacccgtggcgataccctgttcatgctgagcgccacgccgaatcagcagaagaagaaaaccgtcgcccaggcagaagccggcctgtggcgcctgctggaagagttgaaggccaagccgccgaccgccgaagaactggaacgcatccgcgcccaggtcattgccggcctggtctaccagcgtgactccatcaccagccaggccacggccatcggctccctggagaccgtcggcctgtcctggaaactgatggacacggagctcgccgacctgcaaagcgtgaccccggaagatatccagaaagccgcgcgcacctatttcacccgcgaacgtctgagcgtcgcccatgttttgcctgaggagaccgctcatgagtgatcgcaaaagcagccgcctgatcttccccggcctcgtcgtcgttaccctgatcgccgccagcgccgtgtacttcctgcgccccagcgactccgtcgccagcccggcattggaaaaagcccaatcgagcaaccagctgcaatccctggcggaactggacggcaaggcgccgaccaaccgcaagctcgacgttcagacctggaccaccgccgaaggcgccaaggtgctgttcgtcgaagcccatgaactgccgatgttcgacatgcgcatcctgtttgccgccggcagcagccaggacggcaacgtaccgggcctggcgctgatgaccaacgccatgctcaacgaaggtgtaccgggcaaggacgtgagccagatcgcccgtgatttcgaaggcctgggcgctgacttcggcaatggcgcttaccgcgacatggcgctggtgtccctgcgcagcctcagtgacagtagcaaacgcgacgccgccctgagcctgtttgaccaggtgatcggcaaaccgaccttcccggccgactccctggcccggatcaagaaccagatcctcgccggcttcgagtaccagaagcagaaccccggcaagctggccagccttgaactgttcaagcgcctgtacggcgatcacccctacgcgcacccgagcgaaggcacgcccgaaagcgtgccgaagattaccctcgcgcagttgcaggcgttccacgccaaggcttacgcagcgggcaacgcggtgattgcggtggtgggtgacctgacccgcgccgaagccgaagccatgacggccaaggtttctgcatcgctgcccaagggcccggcgctggcgaagatcgcccagccgaccgaacccaaaccgggcctgagccgaatcgagttcccatccaagcaaacccacctgctgttcgcgcaactgggcatcgatcgtgccgacccggactacgcagccttgtccctgggtaaccagatcctcggcggcggcggtttcggcacccgcctgatgagcgaagtgcgtgaaaagcgcggcctgacctatggcgtgtactccggcttctcgccgatgcaggtgcgcggcccgttcatgatcaacctgcagacccgcgcggaaatgagcggcggcaccctgcgcctggtcgaggacgtggtggccgattacctcaagaccggcccgacgcaaaaggaactggatgacgccaaacgcgagctggccggcagcttcccgctgtcgaccgcgagcaatgccgatatcgtcgggcagttgggcgcgatgggtttctacaacctgccgctgacctatctggaagatttcgtgaaacaatcccaggccctgaccgtagagcaggtcaaggctgcaatgaacaaacacttgagcgccgacaagatggtcatcgtgaccgccggcccgacgattgcgcaaaagccactaccgccccccactgataaacccgccgagcagccgctcggggttccggagcattaatggccagttcatctcgcccgaaaaaacctgtccacaacgtgcataacggggtgggccagctgcgcatcattggcggcgaatggcgcagccgcaagctgagcttccccgacgtcgtaggcctgcgcccgacgccggaccgcgtgcgtgaaaccctgttcaactggctcgcgccgtacatcgccggcgccaaggtactcgacccgttcgccggcagtggcgcgctgttcctggaggcgctgtcccgtggcgccgccctgggccaggcgctggacgccagcaatgtggcggtgtccagcctcaaggaacacctgggcaccctgcgctgcaccaccggccaggtgcaaaccgccgacgcgctgcgctatctcgaaacccagccggccagcgaattcgacgtggtgttcctcgacccgccgttcaaccagaacctgctgccgagcgtgtgcgcgttgctggaagaacgccaatggctggcagcggattcgtggatctacactgaaagcgagaccgcgccttctaccctgggcttgccggccacctggcggctacaccgggaacaaaagtccggacgggtgtattacgcgttgtggcaacgcagcgccgcctgacctctgtttgtggcgagcgggcttgccccgcgttgggctgcgnnnnnnnnnnnnnnnnnnnnnnnnnnnnnnnnnnnnnnnnnnnnnnnnnnnnnnnnnnnnnnnnnncgcagcccaacgcggggcaagcccgctcgccacagttaaatgcatccgcagcagagcgtgtcatgaccccttcttccgacctgttcacccccgccttcggcctcggcaacccccacctgcagacactgtgggggccgctgtggcgccccaccacccacatcgaacgccaacgcgaacgcctgtggctggacgacggcgacttcctcgacctcgactggcatggcccccatgacgcgcaagcaccgttggtgctggtgctgcacgggttgaccggttcctccaactcaccctacgtggccggcctgcaaaaagccctggccgcgcaaggctgggccagcgcggcgttgaactggcgcggctgctcgggcgaaccgaacctgttggcgcgcagctatcactccggcgccagcgaagacctggcggcggcgattgcccatctgcgggccaagcgaccgctggcgccgctgtatgcggtgggttactcactgggtggcaatgtgctgctcaagcatttgggcgaaaccggcgaggcatccgggctgcaaggcgcggcggcggtgtcggtgccgttccgtctggaccaatgcgcagaccgtatcggcctgggcttttcgcgggtctatcagaagcatttcatgcgggagatgctggcgtatatccgcgtcaagcaacgccgttttctacaggacggccgggcggaagggttgaagacgcttgaagccctgggctcgttggagaagatgcgcacgttttgggacttcgacggccgggtcaccgcgccgttgcatggtttcctgagtgccgaggactattaccgccgcgcgtcgagccgctattacctgggtgatatccgcacgcccaccctgatcatccaggccgccgatgacccgtttgtgtttgcccacagcctgcccgaggccagtgagctgtcggactgcaccgagttcgaattgctggccaagggcgggcatgtcggttttgtcgatggaacgttgaagcgccccggttactatctggagcgccgtattccggcctggttactcagtcgccggtagcgatggcccgcgccggatcggtgatccactcgctccacgaccctgcatacaacttgcccaatgggtaacccgccaggctcagggcgaacaggttatggcacgccgtcactcctgaaccgcaatacgccaccagctcatccggcgagcgcccctgtaatttttcggcgaagcgttgcttgagctgctcggcgggcaagaagcggccgtccggacccaggttttcgttgaatgccgcacactgcgccccagggatgtgcccggcaatcgggtcgatgggttccacttcaccacgaaagcgcggctgggcgcgggcatcgatcagggtcaacccgggttggcccaggcgtttttgcaggtgctcggcatccagcaccaggcgattgtccggcgtaccgacaaaggtgcccggctcaaccaccggtgcgtccaggctcagcgggaacccggccgcatgccaggccttgaggccaccatccagaataaagacgccatcacgcttgcccagccaggccagcaaccaccaggcccgtgcggcataggctccggggccgtcgtcatacaacacgatatcggtgtcggcgttgatcccccaggcacgcaattgctcggcgaaggcatctgcctccggcaacggatggcgaccggtcacacccttggtcaccggcccgctgaggtggcgctccaggtcagcatactgcgcgccctcgatatgcccttcggcatagctgcagagcccgtagtccgggtcttccaaggcaaaacggcaatcgaggatcaccagcccggccgacttctggcgctcggccagttgctgggggctgatcaattgggcgagcggcatgacggactcctatgagcagattcgggaaaggtcctacttcacttcttccaatgcctgattcaacggcacgtaaaattctttgaacaaggcatcgacggcctccttcgcctggggcgtgacaaaccccgcctccagcaccagcacctgatacaccccgcgcttgatcgcctcggcgctcaaatgtgcagagttttcattggtggtgcacagaaagcgcacccaggaggtgaggatgatccaggcattgagggtcagggcttcggtttgcaccgggtccatattgaggatgccagcgtcgacaaacccttggtaaatggcgccgccctgggtcaggcagcgctgggaaaaacgccggtagccggtggccagttccgggtcgctttccagcaggtgttcgaggtcgcggtgcaggaaacggtagcgccacatgccggccagaacggcctgcaggtagaagcgtttgtcttcgacggtgacggcgcggccttggggcgggcgcaggaaactgtccaccagggcttcgtattcgcgaaacagcacggcgatgatcgcctgcttgttggggaagtggtagtacaggttgcccggcgaaatttccatgtgggcggcaatgtggttggtgctcacactgcgctcgccctgctggttaaaaagctccaggctggtttgcacaatgcgctcgctggtctttactcgtggtgccataggggatcagcttctgtacacgtgataaggcatcttacggcctatccttgcacggataaaaccggatgttgctgcaatgttatttgacaatttagagtaacgactctaaaaatccaggcagacctataacaatcgggaacgccgccatgtctgccaacgttgcctatctgcaagattcccaggcactggaccagctccagcacctgttcgatacccagcgccgcgcctacgccgccaacccgatgccgccagccacgcagcgccagcaatggctcaaggccctgcgcgatctgctcagcgacgagcgccaggcgctgatcgacacgatcagccaggacttcagccaccgcagtgccgacgaaaccctgttcgccgaactgatgcccagcctgcatggcattcactatgccagcaaacacctcaagggttggatgaaaccttcccggcgggctgtaggcattgccttccaaccggcttcggccaaagtcatctaccaaccgctgggcgtagtcggggtgatcgtgccctggaactacccgttgtacctggccatcggcccgctggtcggcgctctcgccgccggcaaccgggtgatgctcaagctcagtgagtccacacccgctaccggcgaattgctcaaggcgctgctggcgaaagtcttcccggaagacctggtgtgcgtggtgctgggtgaagccgaggtaggcatggcgttttccaagctgcccttcgaccacctgctgtttaccggcgccaccagcattggcaagcatgtgatgcgtgcggcggccgaacacctcacgccggtcaccctggagttgggcggcaagtcgccggccatcgtgtctgcggatgtaccgctcaaggacgccgccgaacgtatcgccttcggtaaggcattgaacgccgggcaaacctgcgtggcgcccgactatgtattggtgccggaagaccgcgtcgacggtttcgtcgaggcctacacccaggctgttcgcgggttttatccgaccctggccgacaacccggactacaccgccatcatcaacgaacggcaactggcccggctgaatgcctacgtcaaggacgccaccgacaagggcgccaccctgattccgctgtacgaccagggccaggcgcggcgcatggcccacagcctgttgctgaatgtcagcgatgacatgaccgtgatgcaggacgagatcttcggcccggtactgccgatcgtgccgtatcgcggtatcgaccaggcctttgcctatatcaaccaacgccctcgcccactggccctgtactacttcggctacaacaagcgcgagcaggaccgcgtgctccacgaaacccactccggcggcgtatgcctgaacgacacgctgctgcatgtggctcaggacgatatgccctttggcggcatcggcccgtcgggcatgggccactaccacggccacgaaggcttcctgacgttcagcaaagccaagggcgtgctggtgaagcagcgcctgaacgcggcgaagctgatctacccgccctacggcaaagctatccagaagttgatccagaagctgttcgttcgctgaaaccgccacccacgggataacaataacaatgaaccctagcctgactgattcacccgcgctgtcgcggcgcggcgtcttgaagattggcctgtgcgccagcgccttcctggcgaccgccgggttgggcgccagcctcagcggttgctccagcagcacgccggccagcggctttgccatgctgcgagccagtgacctgccgttcctgcgcgcggtgatcccggtgctgctcgaaggcgtggccagcgcccaggaagttgccagcgggattgaagacacccttaagaagctcgactacagcctgcaacacctgtcgccggagatgttcaagctcacccagcaactgttcgacgtattgggcatgggcgtcacccgtgggccgttgaccgggatctggggcagttgggaaaacgccagcggcgagcagatacgcaacttcctgcaccgctgggaaaacagctacctgaacctgctgcgcatgggccagggctcgctgctcaagctggtgatcatggcctggtatttccagccggcgtcctgggcgcattgcggttaccccggcccaccgaagatttgattcgccgcccccccataaaaacaagagacgaccctgatgcccgtacccgacctgttccgcgacggcatggcccgtggctggaaaacccacaatggcgccgcgctcgataacgacctgaccctggaagccgatgtggcgatcatcggcagcggcgccggtggcggcaccactgccgagattctcagcgccgccggctacaaggtgctgctgatcgaagaaggcccgctcaagaccagcagtgacttcaaactgctggaagacgaggcctacgccagcctgtaccaggaaggtatcggccgcatgagcaaggacggcgccatcaccatcctgcaaggccgggcggtgggcggcactacgctgatcaactggacgtcgagctttcgcaccccggacgccaccctcgcccactgggccagcgaatacgcggtgaaaggccacagcagcgccgagatggcaccgtggttcgaaaagatggagcagcgcctgggcatcgcaccgtgggccatccccccgaatgccaacaacgatgtcatccgcaaaggctgcgaaaagctcggctacagctggcatgtgatcccacgtaacgtgcgcggctgtttcaacctgggttattgcggcatgggctgcccagtcaatgccaagcagtcgatgctggtgacgaccatcccgtccaccctggaaaaaggcggagagctgttgtacctggcccgcgccgagcgcctcctctataaaggcgacgctatcagtagcctggaatgcgtggcgatggacgagcgttgcgtggcgcctaccggacgcaagatcaccgtgaaggccaggcattacgtgctctccggcggcggcatcaacagcccggcgctgctgatgcgctcggatgcacccgacccgcactcgcggctaggcaagcgtacctttctgcatctggtgaacttctccgccgggctgttcgacgaggtgatcaacccgttctacggcgcgccgcagtcgatctattccgatcactttcaatggcaggacggcactaccggcaaaatgtcctacaagctggaagcaccgcccctgcatccaggcttagccagcaccttgttcggcggctatggcacgcagaacgccttggacatgagccaattgccgcatacccacgccatgcttgcgctgttgcgtgacggttttcaccccgacagccagggcggcagcgtggatttacgcggtgacggtacgccggtgctcgattatcaggtctccccctatgcctgggacggcctgcgccgggcgtttcacagcatggccgagatccagttcgcggcgggcgccaagtcggtcaagccgctacaccacgacgcgcggttcgtgaacaccttggccgaggcacgccgtgtgattgacgggttgaacctggaactgcaccgaaccacgctaggcagcgcccatgtgatgggcggctgcgccatgggtgaagacccgaaaaacgcagtggccgacagcctgggtcgccatcaccagttgcgcaatctgtcgatccacgatggttctctattccccaccagcattggggccaatccacaattatcggtgtacggtttgaccgcccaactggcgacagcgttggccgaacgtctgaaaacagcgtgaaaaaacacagtattcgccgtgtctatagtgctttcttctgcataagttgactttcccgaccgggacggctgcgataccatccggttccccaacggactccgccaggacgacgcgatgaaccgagtgttgtacccaggtaccttcgacccgattaccaaaggccatggcgatctggtcgaacgtgcctcacgcttgttcgaccatgtgatcatcgcggtcgcagccagccccaagaaaaacccgctgtttcccctggaacagcgcgtggagctggcgcgtgaggtcaccaaacacctgcccaatgtggaagtggtgggcttttccacactgctggcgcatttcgccaaggagcagaatgccaatgtgttcctgcgcggcctgcgtgcggtgtcggacttcgaatacgaattccagctggccaacatgaaccgccaattggcgccggacgtggaaagcttgttcctcacgccgtcggagcgttattcgttcatttcctcgacgttggtccgtgaaattgccgctttgggcggagatatcaccaagttcgtgcacccggccgtggcggatgcactgaccctgcgcttcaagaaataagcccccaatcggcgcctgctcgcactgcgggcgccaatgcggcacaattgcgcgcattagttttcagatgccttggctgacagccctggcaggagtttccatgtccctgatcatcaccgacgattgcatcaactgcgacgtctgcgaacccgagtgcccgaacgccgcaatttcccagggcgaagagatctacgtgatcgacccgaacctgtgcacccagtgcgtcggccactacgacgagccgcagtgccagcaggtttgtccggtggattgcattccgctggatgaggcccatccggaaacggaagagcagctaatggccaagtaccggttgattaccggtaaagcctaagactggcacttggggcaaaacacactcgcccgctgtcccagcaccacattgcgcaattcgctgccgcagaccttgcacgcctcgccgccccggccatagacgaacagttcctgctggaaataccccggttgcccgtcgccgccgataaagtcgcgcaacgtggtgccgccacgctcgatggcagccgccagcacgcgcttgatctcgatcgccagcttcaaataacgtgctcgtgagataccgccggcctcgcgacgcggatcgatccccgccgcaaacagcgcttctgtcgcgtagatattgcccacacccaccaccaccgcgttgtccatgatgaacggcttcaccgccatcgaccgcccacgggacagctggaacagacgctcaccgtcaaacaggtcggtcagcggctccggccccaggcggatcagcagttcatggttgtgcgggtcctggctccagagcatcgcgccaaaccgccgagggtcggtgtagcgcaaggccaggccggactccagttcgatatccacatgctcatgcttggccgctggcatgccaacctctaccaggcgcaagttgcccgacatgccgaggtggctgatcaaggtgcccacttcggcattgatcaacaggtacttggcccgccgctccaccagcacgatgcgctggccggacaggcgcacatcgaggtcttccgggatcggccagcgcaagcgtcgctcgcgcaccaccacgcggctgacccgctggccttccaggtgcggcgcgatcccgcgccgggtggtttcgacttctggtaactcgggcatgtgtacctcttgaaggaaggatcagtgggcgcccagttcgcggatcgacaacttcatgctctcgaagtcgtagtccgacagccccacgtaatccagcaccaggtggccgatggcgttccactcatggtccaccgcctggttacccagcacgcggtaggacgagcagatgtgctcggccattttcaggatcgccagcaggttcttcaattgcgaattgcgcgctgactcatcactgaaaatcgccagggcgttgtggtggttggcgatggcgtcagtcacatgctgcggcaggcgccaggatttcgcggtgtagtagccaaccaccgcatggttggtgttgaacgcgttgttctcggtatcgaccacgcggcaatcggggccggcatttgcatacgcctgctccagcaccgacatgtagttggggaagcgcttgagcatcaacggcacgccacagtcgtggaacaggcccagggcataggcctcgtccaccgcctgggcgccggtgcgcttggccagggtgaggcaggtcatggccacatcctgggcggtgtcccagaagcggttgagggtgacgatggtgtcgtcgctcatctcgcctttgatcgacagcgcattgatcaggttgatgatcgagcggctgcccagcaggttcaccgcgcgctggatcgaagcgatcttgttactcaggccgtaatacgacgagttgacgatcttcagcaacgcgccggacaggcccgggtcctgggagatcagccgtgcgatcacttccaggtccggatcgggcatgtattgctccatctgcaaatccaccatgatttgcggctggggcggcacgctgatgccttgcagggcctgttggatctgttcggcggaaagctcttgggacataagtacacactctgggctaggcggggattctaacccctaagcaaacctgaccgacacccaaatgcccgattgaaaccggactaaatgtgggagggcgcttgctcccgatggcatcaccgccatacgtcagatacaccgcgccgcctgcatcgcgggcaagcccactcccacatgaaccgcgccgcaacaggtatactcccgctcttttttccggagcgacgtcatgtccctgccaagcctgcgtctcaaagccaacgccgatcgtcgtttgcgcaacggccacctgtgggtctacagcaacgaaatcgacgtggccgccaccccactccacggcttccaggcgggcgaccaggccatcctcgaagcggccggcggcaagaccctgggcatcgtggccatgagcccgaacaacctgatctgcgcccgcctgctgtcgcgcgatatcaagttgccgctggacaagtcgctgctggtgcaccgcctgaacgtcgccctgtcgctgcgcgatcgcctgttcgacaagccgttctaccgcctggtctacggcgattccgacctgttgccgggcctggtggtcgaccgtttcggtgacatcctggtggtgcagatcgcctcggcgaccatggaagcgcataaagaagacgtgatcgccgccctgacccaagtgctcaagccaagcggcatcctgttcaagaacgactccgccgcgcgcgacgccgaaggcctcaaccgctacgtcgaaaccgtattcggcctggtgccggagtgggtggcgctggaagaaaacggcgtgaaattcgaagccccggtaatccagggccagaagaccggctggttctacgaccaccgcatgaaccgcgcccgcctggccccgtatgccaagggcaagcgcgtgctggacctgtacagctacatcggcggttggggcgtgcaagccgcagccttcggcgccagcgaagtgttctgcgtcgacgcctccgccttcgccctcgacggcgtggagcgcaacgccgcgctgaacggctttgccgagaagatgacctgcatcgaaggcgacgtctttgaagcgttgaaagaactgaaagccagcgaagaacgcttcgacgtgatcgtcgccgacccgccggccttcatcaaacgcaagaaagacatgaaaaacggcgaaggcgcttaccgccgcctcaacgagcaagccatgcgcctgctcagcaaggacggcatcctggtcagcgcgtcgtgctccatgcacctgccggaagacgacttgcaaaacatcctgctgaccagcgcccgtcacctggaccgtaatatccagatgctggaacgtggtggccagggtccggatcatccggtgcacccagcgattgccgagacgcggtatatcaagagcattacgtgccggctgttgccgaatagctgatgccgttggcctgtaggggcctccgggttcctacaggctttcaggaagtttcgccccgcaccaggttttgactttcctctgctcaggctcgatcctcgaccccctcacggaatcgaggctcgcgcatgtcgacggcaatcacacaggctgaaaaacccttcattgttttctggctgatgaccatgaccctgctgggcgtcttcccgcttgacgtcgtgctgccctcctttcccgccctggcggaacacttctccacctccaccacccaggtcgcccgctcggtcagcctgttcgccattggcttttcatgcgccatgctgttgatcggcccgctgtccgacaggatcggccgcaagaagctgctactggccagcatgctcgtcgcaatcatgggtgcggccgggtgtttaaccgccagcacgactgcccaattcctgttctttcgcgtcatccaggccatgggttgcggcggtttcatactgtcccaagcgttggtgcaggaccttttcttcggcagagaacaagagcggttgcggatcgccatggctacggccgggggaattttcatttcggtttccccgctgctgggcgcgtggctgcaactgcacggggggtggcaagccagcttctatgtgtttatagcgctctgtgcagccaccctgatcatggctcaccggctactccatggcggcttgcctcaagcggcaccaagccgccaaagcatgttcaaggcctacacaaaggtcttcgccagccggcacttcgccagctatgccacgatctccgcgattaccttcgcctgtcatttctcgttcatcgttgtgtcaccgctgattttcatggaccagttgcagctgacgccccacgaatactcgttgaccctgctcctctacggcgccgcttatgtactgggcggtgtcagtgcgggcttcttgcacaagcgactaccggccgcgacccagatggccaccgggctggtgctgatcgcgatctcgggcatcgtcatgctggtcctcgcctatcagttcggcttatcaaccccgacggtgctggtgcccatgctgctctgcacagcaggcacgaccatcacccgccccatttccaattccaaggccatgagcttgtttccggacaatgcagggacggcggcctcagcggtggcggcagtgctattcattgccggtggtcttatcagtgcattcatcagcacctttacccaccatctgagtaccgcgctgggtctgtgctttctgatgctgagcgccgtcgccctggccctgaacgcatgggcgcggcgtcacccgcacgtcccgtagccgctatcttcacggtttcggtcattccctcccgccgccagcggtgtagaatcggccctattcatcgccagtcatcccccggcgggtttatgagctcgaggcccaagcacgcggcgatcccgcgacgcgagtggcaacttccggacacacggccatttttcgggtgttccagtagtgaaatagaagctcactcccctttagtacttgattagccgcccggagtgctccatgccagattaccgctcgaaaacatccacccacggccgcaacatggccggcgcgcgcgcactgtggcgtgccacggggatgaaagatgacgacttcaagaagccgatcatcgcgattgccaactcgttcacccaattcgtacccggccacgtccacctcaaggacctgggccagctggtcgcccgcgagatcgaacgcgccggcggtgtcgccaaagagttcaacaccatcgccgtggatgacggcatcgccatgggccatgacggcatgctgtattccctgccgagccgcgagatcatcgccgactccgtggagtacatggtcaacgcccactgcgccgacgccatcgtgtgcatttccaactgcgacaagatcacccccggcatgctgatggccgccctgcgcctgaacatcccggtgatcttcgtgtccggcggcccgatggaagccggcaagaccaagctcgcttcccacggcctcgacctggtcgacgccatggtcatcgccgccgattccagcgcttctgacgagaaggtcgcggaatacgagcgcagcgcttgcccaacgtgcggctcgtgctccggcatgttcaccgccaactcgatgaactgcctggtggaagccctgggcctggccttgccgggcaacggctcgacactggccacccacagcgaccgcgaacaactgttcctggaggccggccgcaccatcgtcgagctgtgcaagcgctactacggcgagaacgatgagtcggtgttgccgcgtaacatcgccaacttcaaggcgttcgagaacgccatgaccctggacatcgccatgggcggttccaccaacaccatcctgcatttgctggccgccgcccaggaagccgagatcgcgtttgacctgcgcgacatcgaccgcctgtcccgccacgtgccacaactgtgcaaagttgcgccgaacatccagaagtaccacatggaagacgtgcaccgcgccggcgggatcttctcgatccttggctcgctggcccgtggcggcctgctgcacaccgacctgccgaccgtgcacagcaagtccatcgccgaaggcatcgccaagtgggacatcacccagaccgacgacgaagccgtgcacaccttcttcaaggccggcccggccggcattccgacgcaaaccgcattcagccagtcgacccgttgggacaccctcgacgacgaccgtgaaaacggctgcatccgcagtgtcgagcacgcctactcccaagaaggcggcctggccgtgctgtacggcaatatcgccctggacggctgcgtggtgaaaaccgccggtgtggatgagtccatccacgtgttcgaaggccgcgccaagatctacgaaagccaggacagctcggttcgtggcatcctcgctgacgaagtgaaggaaggcgacatcgtgatcatccgctacgaaggcccgaaaggcggcccgggtatgcaggagatgctgtacccgacgtcctacctgaaatccaagggtctgggcaaagcctgcgccttgctcaccgacggccgcttctccggtggtacctcgggcctgtccatcggccatgcttcgccggaagccgcagccggtggcgcgattggcttggtgcaggacggcgacaaggtactgatcgacattccaaaccgctcgatcaacctgttgatcagcgacgaagaactggcggcacgccgggtcgagcaggacaagaaaggctggaagccggtggagaagcgtccgcgcaaagtcaccaccgcattgaaagcctatgccctgctggccaccagtgccgacaagggtgcggtgcgtaacaaagcgatgctcgacggcctgtaagcctcgcccatgaaaatgccccgccaagtgcggggcatttttttgcctggcgttctgacgctgtagtttttcatacgccggccgataacaggcgcatctgtattctcaaggaccttacccgcatggatgctcgctcttccgctctacgcccagctgcatgggcgctttccctattggcgttggccggttgcagctcgctgcaaaagcctcaggtggacccaggcctggcactcttcaacgaagccatgacactgccggcgctcgactacaccatcctgcgcaacggcgacagagtcgcgtactccgtcgatttgcagcaaaacccgatctctgtgcagttcgacgcctattgcacacaaggtcctggaaggatgctctaccccacgcgcacgggcctgcgggcatttactccctcaccggcaacaggcgtcgacctgccggcggcacaggcccaacaactgcagcaaagcgctcaattgcagagcgtatgcaaggcacgtcccgtgcccgactggcgggtgctgcaaacctctgccgatcagggctggctgctgatcgaccgtaacagcgtgcagcagcaaggcagtcagatatccgcctgggtcgcacaggattacctgcactatcaggtcgccaagaacgcatcgttgtttactcaacggcaggagcggctgaccctggattgcacacaacgcaccattacgttgatgagccagttcaacctcgatgaaacgcgccagatgatcaacggcgaaatccgtcgacaattcaagccgcaagccttggagcaagcttccggcgaacatgcccagctcttcaaggctctgtgccaggcgccgatggagctggcccagttacccgctttcaaggcgcgccaggcattgccacccgctgccagcgcaacgaatgccaacccagccgtactggcggccatccgagcgctcggcctgcctgcgccaacccgcaccctgagcgagctggcctacgactatgacgccgtgctcttcaacaacacccgcgtgggcgaccagaccaaacagacattcatcagtgtcgacaacgcatcgggtcagacgctggtacaaacacgcgactcggcacttggctttaaccaggagctgaccttccaaggcctgtttgatctggacagccaaggtctcgaccgcaaaaccggcagggacaaggtgaagacccgcctcttggttggcctgagctttcaaggcgattggcgtaacttgcccctcgccagtgaggtgggctacacccagacatggtcaaaatccatcaaccccgatggcagtccttcgccagagaacagcgagccaagaaccgtgacctgcaaggtcgctcgggaaatcccggctgccaccctcaccccggacctgaagggacaagccaaggtactcgactgcgttcagatgaaaggttggacttatcaggcagcctacctgagcgactatgggctgttcatcaaactgcatgagaacgcgttggttgcgcaatggaactggcatttgaaatcggtgaagtgaccccttgtataggcgccgggttctagaactgcggcttgtacgtcacgctgaacatcatgtttcgcgggtcgccgaagtagttgttgcctaccaactggctgtaggacgggatgtagtaacgcttgtccaagaggttgttgaagttcaccgccaaggtgacttcatcactggcatcgtaggcgactcgggaattgaaaattgcaaagccggcctggccaaagttgcggtcaaagctggtggtcgccgtctgtgcattgacccctgcacccaggctgacacggttgaaatcccccggtagtttgtaatcgccccagatccgcagcatgtgcttgggcaccgccgtactgaagaccttacccttcagttcggtgtctttcaaaaacaccgtggtgttgtaggtatagctactgctgacctgcaaacccggcgccaattggccgctgacctcagcctccagcccctggctgcgcaccttgcccgaggcggtggagcagtaccagccactgcaggcgtttggtccatcgatatcggtgctgaagtcagtgacggcgcggttttcgtggatatagcggaacagcgcaagggatgtattgagacgtccatccagcaactcccccttgatccccacctcatagttgcgcccttcgatcggcggcagaccggtcttttgctgggtcaactgggtttgcgggatgaacacctccgcgtagctgccatacaccgaccactggtcgtccagtgcgtacaccaggcccgcaaagggtgtgaccttgccattgctcttgaccgagtttttttcaccaccctcctgatactcacgggcatagtagttgtcttggtcgaaggcgaagtcgtaccaactggtacgagcgccgaggatcaatgtcagaggctccgtcaggttgatccgccaggtgccgtaaagacctttttgggtgatgtcataggtgctcaaggccaagttggcgcgatcagcaatgctgttataggtcggttgtggtcggtgatggtcgatggcaccgatatcggctcccggcgtgaacgcacgggcatagccgtcatccgtgttgtacttggaatagttgccccccagcaccaggctctgcttgaacgacagcgcttcaaaatctccgctgacataggcgtcgaacccgcggttcttgccatagaaatctgtggagtagtcagcgtagttaccgctgcgcgttgagccgaccggcaccgcacccacgataaattgataagtggcttcattggattcattcatcgccagcgcggaggcgttgaatttccagtgatcgttaaagcggtgctcaagatccaggtataccgccgtctgatcgttgaacgagcggttccaacttgctcccgtataggtcgaacgtgacacatccaatgcactgccatcggtgtgacgcggcaaggcgatcaaatacggacggccatggctctttttattgctgaaaccgacccccagggtcgtgtcatcgtccaagtcgaagtccagcgcgccgtacacggtctgctcccaattccacacgtagtcggtgaaggagtggcccttctcatagttgaccacggcgcggccacggatcgtcccggcctcgttcaatgggccgcccacgtccgcctgggacgcataccggtcccaactgccagccttggcgctcaaggttacagtcggtgcagcctggggacgcttgcgcaccagattgattgccccgcccgggctgttggcgccttgcagcaggccagcagcaccacgcaggacttccatgcggtcgtagatcaccatgttctcggtgatgtagctacccaacgcatacacgttacggggtaccggcacgccatcgtattgcagcgattcaatctcgaagccacgcgcaaacatgaacatcccgggccctggcgacttgaccgacgccatgcccggcaccgcttcaatcgcttgggtcagggtggttatgttctggtcatccatcgctttgcgggtcagcacactgaccgattgcgggatgtccttgagcttttgcgtgcccttgccgatggtcacggctccggtggtgtaagaaccgctgccttcggtggtcgtccccaagtggtcagcgctgatggtggtggcgccgacttcgagggcactgccagtgtctacgcgcttttccagggtgacggtgtcggcattgatgaacgccgcgctcagccctgtacctcccagcagcaagcccattgcctcgcgctgccccaagtgaccgctgacacctggcgacaccagcccctgggtcaactcaccattcaccagcacctgcacccgtgtcaccgccgaaaatgccgccagcgcaccgtccaggctctgccccggaatgtcgaatcggtaggtctgggcctgggtggtttcggcggcctgcaggtacagcggcgcagtgccgcaggccatggaaatggccagtgccagcaagggccgtgcggcgaatcggtgtgccatggatagtgctccccggtgcaaaaagtctgtgatcggcgccgcactacttgagagtgcttactatttacgcctcagtgatcaaggacgatggcttgcggggaaaccctgaaaatattttgcaaaagttgccgctaagaggctttgccttcgcgcaacaccagtaaatacggggtgtagtgctcagcgcgcaggttgagggtgtattccagcgctttgatcacggcctcgggtttgtcgatctcgaacacgccggacaccacgcgattacgcagcgaatcgcccagcaccagggtcgtgccaggccagtagcggttcaactcgctgaccacttccgacagcggctgttggcgaaacaccagttgtcgctggcgccaggcaaaaccgctggccgcatcgaaaccgtgcacctcggcaaggcgctcgccctgatattccacggcccgtcccggctccaggtagaccggctcaccggcgcccgcgctgacctgcaccttgccctgcgccacttgcacgcgcgtctgcgcatcccgccttgccacgctgaactgggtgccgaccaccttcacccagccctcgccggactgcaccacgaagggccgcgccgggtctttggtcacgctgaaaaaaccttccccgcgcaacaggcggatctgacgctcaccgccgctcatgcgtacctgaacagcactgtcagtgttgagctgcaactgggagccatcggccaactcgaccgtgcgcgactcgccggtgccggtggcatagtccgcgcgcaggcggtcgagccagggcgtgtgctgcacggtcaacccaaccgtcagcagcaccgcagcggcataagcccagcgccgcgcgggtttgcgccacgcggcctgctcggcgcggcggatcagccgtgccggttcacgcaaaccaccgagcatcgcctgcacttcctgccaggcgtcgtcctggggctggccctgcccgagccaggcggcaaaggcgtccatctcggccggggtcacgtcctcggcctgcaagcggaaataccaggcggacgcttcttcgaacaacacgtcgacagggggtaacgcagtcatgaccgacgtccttgtgtgtcgcaggcgagccgcgtcttgatgtaggcgcggcattcaatcaaggcgcgacgcagttggtattccacgctgcgtggggtgatcgacaggcgttcgccaatctcgcggtaggaaagttcgtcgacatgatagagcaggaagatctgccgagtcgcttcgggtaacgccaggatggcgtcctgcatcagtcgctcctgctggtaggcggccagttgttcgtcggcaccggggttgccgcacggcagctcttcgctgggctcgccggcatccaggcgctcacggcggatggcctggcgctggtgatcgcgcaccaggttgctggcgatggtgaagaggaaggctggcaggttgtcgatcttctcgccggaatccaggcgtgccaggcgcaggaacgattcctgggtcaggtcggcggccacctgagcgctgccggtgcggcgggtgacgaaggcttcgagggctttcttctgctccgcgaacaggcgcgcgatctgcgaattccaggaggacacagcactaccttgagaagaaccgagggttcaggaagtgcgcacgctagcagaggatgagattggttcgcaattgatatctatttttgctgtgacctttagggtgtcaatcagatagctatcgggggcaagccccctcccacagttgaccgagttcacactgtcgaaatgtgggagggggcttgcccccgatcaaagccacctcggacttattggatttcgtcaggcttgacgatcacccagttcttgtccgccgttaccggcaacccttccttggcctgcgccgccgcgtgcttggcgatcatgccgttgagttgggtcatgtacttgtccttgcggttgatccacaaatgcacgccgcccttggccacgtctacatcgtgaaacagcatgtagccatcgctggtcggggtgtcgccacccaccagtaccggctttttccattcgtcgatgtaagtgaggatcgccgcgtgcttgccggccatccaggtcgccggggtccacaggtagggcgtgagttccaggccgaggttggccttctcgtcatacttgccggcggtgatctgtttgcgcgcggtggtcagctcgccggtcttgcggtccttgagcagggtggtcacaccgatgacgttctcgggcttgacgttgtagccgtacttcggatcggcggcgaccatgcgcaccagctcttcggaagcagcggtcatcacgtagacctcgatgccgttttccatcagcttgttgtacagctcggcctggccggtgaagactttcggcggttgcacctcggacttcttaaccgcgtcaccttcgaaataggtaacgggcacgggcttgccagaggccatcagctcatcgacctgcaccttgagttccttgagggtgaaccccgagaacacctgggcaacccacgggtagcagaccatgtcgtccacttcgcagaggcggtagtagtagctgaacagactttccttatggtcggcggtgtctttgaacggcataagcttgagcgacggatcgaggctgtcgcgggtgatcaggcccttgttttccatgtagggcagcagggactcttcgaggtcatagcggtagctggtgttgtccatgtcgaacaccgcgaaattgcccttgttggcgttggcagcgatcattttgttcagttgctcggcggccggggccggccagtgtttcaactcggtggcggccatggttggtccggcaaggccaatgcacaacgcggcggcaaacaatctcgaagcgagcttcatatgcgtttctccctgagtgaaaaacatcgacgctaacaaatccctgtgacagttatcgcccgagcacgaccgcttgcgtcgtgatcgcgccaatggcatgtgcctgagcgtcaaaggcttattccaaaaacgacagtcaccattccatatcggtattaaatcaatatatttcaagctgttaggctttccggttcgcaatcgcaggctcgcgcgattggctgccttctcaacggagcttcaatgaatctgcccctgattctcaacttactggtgttcgtggccctgttgctgggcctggcacaaacccgtcgcacaaactggagcctggccaagaaggtgctgtttgccctcgtccttggcgtggtgttcggcaccgtgctgcacacgatctacggtgacggcaacccggtactcaaggcctccatcggctggttcgacctggtgggtaacggttacgtgcaattgctgcaaatgatcgtgatcccgctggtattcgcgtcgatcctcagcgccgtggcccgtctgcacaacgcctcgtccctgggcaagatcagcttcctgaccatcggcacactgctgttcaccactgcgattgcggcgctgatcggtatcggcctgaccaacctgttcggcctcaccgccgaaggcctggtggccggcacccaggaaatggcgcgcctgcaagtgatccagagcgattacgcgggcaaggtcgccgacctgaatatcccccaactgctgctgtcgttcgtgccggccaacccgttcgccgacctggcccgggccaagccgacctcgatcatcagcgtggtgattttcgctgcgttcctgggggtcgcggcgctgcaactgctcaaggatgacgtggaaaaaggccagaaagtcctcaacgccatcgacaccctgcaagcctgggtaatgcgtctggtgcgcctggtaatgaagctgacgccgtatggcgtattggcgctgatgaccaaagtggtcgccggttccaacctgcaagacatcatcaagctcggcagtttcgtggtggtgtcgtacctggccctgggcctgatgttcgtggtgcacggcctattgctgtccctggccgggatcaacccgctgcgcttcttccgcaaggtgtggccggtgctgacctttgccttcaccagccgctccagtgcggcggcgatcccgctgagcattgaagcgcagacccgccgcctgggcatcccgcaatccatcgccgggtttgctgcctcgtttggcgcgaccatcggccagaacggttgcgccggtctttatcctgcgatgttggcggtgatggtcgcgcctaccgtgggcatcaacccgctggacccgctgtggatcgcgaccctggtggcaattgtgaccttgagttcggcaggcgttgctggcgtgggcggtggcgcaaccttcgccgcgctgatcgtactgccggccatgggtttgccggtgtcactggtggcgctgctgatttccgtagagccactgatcgacatgggccgtacggcgctgaacgtgaacggttcgatgacggcgggggcgattaccagccaggtcatggggcagacggataaggcgttgttgaatgccgatgagcatgcggaattagcgcaagcctgatagatagcaatcgggggcaagccccctcccgcacttgactgggctcacacggtcaacatgtgggagggggcttgcccccgacgcttttaggctttttcccagacttcgaagttgtacgccggcttatcaccttcagctggattctccagattggaaaccaacttccactggccccgatcaaactctggaaaccaggcatccccctccgggctcaacgccacccgcgtcaaatacaggcgatccgcctgctccagcccctgcgcatacaactgcgcaccgccaatcagcatcagctcgtcaacaccttgcgccgttgcccattcctcagcgcgctccaccgcggcctccagagacggaaaaacttccgcaccttccagcgccagatcggtctgacggctaaccaccaggttcaagcgccccggcagcggtcggcccagggaatcccaggtcttgcgccccatgatgatcggcttgccgagcgtggtggccttgaagtatttgaaatcccccggcaaatgccagggcatgctgttgtcgacgccgatcacacggttttcaccgagggctgcgatcaggcttaaagggagagtttttttcatggcgacgagaataccagagccccgagccaggggttatgctccaggctcacaaacacgacaggacaacgcgtgactcctctgcacactctctggctgacagaaaccgtgcgcctgcgtgaagaacacgccggccccctggaagacctggaagccaatcgcctggcccgctcggcaggtggcgatctgccgacgcgtatccagcagcgtgccctgcacctggccgagcgcgatgggctcacgaccgccctcacccgctggttgcaaggcgcacgcctggcgctggtgctgctggcggtcatcgccgtgatcagcggcgcgggcctggcctttgccgcgctgggcaacgggctggtcccggtgaatgtgttctgggccttgggcagcttgctcggcttgaacctgatcctgctgatcagctgggccttgggcctgctgtttgccggtgaacacagcgccagcctcgggcgactgtggttatggctcagcgaaaaactcgcccgtgacgcaaaggctgcgcagttggcgcccgcactcctgctattgctgcaacgccagaaactcaatcgctgggccgtgggtatgctggtcaacagcctgtggttgttggcgttgctcagcgccctggtgattcttcttacgctactcgccacccgccgctacggcttcgtgtgggaaaccaccatcctcggcgccgacaccttcgtcgccgtgacccaggccctcggcaccctgcccgtgctgatgggcttcaatgtgccgagcgtcgagatgatccgtgccagcggcgattccgcgctgaatatcgaaagcgcccgccaagcctgggccgcatggctggtgggcgtgctgctggtctatggcctgttgccacgcttgatcctcgccctgctgtgcctgtggcgctggaagcgtgggcgcgccgcgctgcgcctggacctcaacctgcccggctacagccaattgcgcgagcgcctgatgccgagcagcgagcgccttggggtcaatgatgccgcgcccgaacaactgcatcacatcagcggcggcgtcagcgaactgcaaagcgacggcgcgctgctggtcgccatcgaactggacgaccagcattcctggccgcccaaactgccgcacaacgtgaagaacgccggcgtcctcgacagccgcgaatcgcgtaacaaactgctggagcaactcacgcgctttccgcccgcccgcctggccatcgcctgcgacccgcgccgctcgccggatcgcggcagcctggcgctgatcgccgaactcgcccgcagcgccaccgccacccgcgtatggctgctgcaagcgccgcccggccaggccctggacgccgaacgcctgggcgactggcatgccgcgctgcagcagcttgaattgccctttgccaactgcgcgccgctgaactggctggagaccggtcatgactaagcccctgaaactcgccgtggttggccacaccaatgtcggcaagacctcgctgctgcgcaccctcacgcgagacgtcggtttcggcgaagtgtcccatcgtcccagcaccacacggcatgtggaaggcgcgcgcttgtcggtcgacggcgaagccttgctggagctgtacgacacccccggcctggaagacgccatcgccctgctcgactacctggaacgcctcgaccgccccggcgaacgcctcgacggcccggcccgcctggcgcgcttcctggaaggcagcgaagcgcgccagcgtttcgaacaggaagccaaggtgctgcgccaactgctggcctccgacgccggcctgtatgtgatcgacgcccgcgagccggtactggccaagtaccgcgatgagctgcaagtgctggccagctgcggcaaaccgttgctgccggtgctcaactttgtcagcagcagcgaccaccgcgagccggactggcgcgaagccctggcccggcttggcctgcacgcgctggtgcgcttcgacagcgtggcaccaccggaaaacggcgaacggcgcctgtatgaaagcctggccctgctgttggaaaacgcacgaccgcaattggaacggctgatcctggatcaagaggcgcagagccaggcccgtcagcaaagcgccgcccggctgatcgccgaattgctgatcgactgcgccgcctgccgccgcagtgtggtcaccgaagatgagcaacacgccatcggcgacctgcgcaaagccgtgcgccaacgtgaacaaaagtgtgtggaggcgctgctcaagctgttcggcttccgcccgcaggatgccgccgccagtgacttgccgctgctggacgggcgctggggcgacgacctgttcaacccggaaaccctcaagcaactcggcgtgcgcgtcggtggcgggatcgccgcaggcgcggcggcgggtgccggtgtggatctgttggtcggcggcctgaccttgggcgccgccgccctggccggcgccattgccggtggcgcgctgcaaaccgcgcgcagctatggcagccggctgctgggcaagatcaaaggccaacgcgagctgaccgtggacgacagcgtgttgcgcctgctcgccctgcgccaacgccagttgctcaaggccctgggcctgcgcggccatgcggcgatgcacagcatcaaggtcgacacgcctcaggacaagacctggcgcgaaggcaagttgccggacgcgttgcacaaagcccgcgcccatccgcaatggtcgtcgctcaaccctcaccccaagctcagccaggctgagcgccaggaacaggtcgaagctctggcccggcgcctcgacgaaacctaagccgccagcacctgccgcgccttggccttgagcacctcgaggtcgagcaccggcacgtgcattgccttggcctgctcgtcccaatggcgcatgcgcaggctgatctcgcagagcgggtcttgatcaaacgcccgcgcttcttcctgggtcattacaccgccctggtacccgagcgtacggcgactggcttcgctcaggcgggcgtaatagtccggctggctgaaggtcaggtagcgcttggcttgcacgtgatattccaccagcttggccatgcgctcgctgaagcctgcacgacgcaggtaatcggcgccgagccgctcatggctgaccacgccataaccgcccatgttctcgccgccttcgccgcacaagtgcccgatatcgtggaaaaacgccgccagcaccacttcatcatcgaagccttcggccatggccaactgcgcggcctgggacatgtgctcgatctgcgacaccggctcgccaatgtaatccgctgtgccgtgttgctcgtacaagccgaagacttcgtcgatggtctgttcagaggtcatcacgccgccccccacaaggttgtgatattgcgttcggccatcgccggccccacgctcatgcccacaccggtgtgcatcaacgctgcactcacacccggcgccgctcgcaggaacgaaaacggcgccggcccgcgcgagccgtacacaccctgccagcgctccaccacctggatcttgcagcccagggtctgctcggccaactcgatcatccagtcatccacctgctcggcattgaacggcgatgcatcgctgccgtagtcatgggagtcaccgatgatcagttcgccatggggcgtggggctgatcagcaaatggatgccgtgttcgtgcaggtgtggcgcttcacgcaggatctgcgcctggatcggcgccgcttccgggagatcggcgaaagcgccgtagtgcacgcagctcaagccggtgagcaaggcgtgttgcaggttcaggttcaccgctggccgcgcgcgcagcatttgcaggcgacagatgctcgggttgagttcggccatcgcttcggccagcagagtctggtagtcgtggccggagcacacgatgatctgttcagcgcgaaagctgcctgccgtgctgtgcaactggcccggttcgacgtcgcgcaccagggtggagaagtagaactccacgttcagctcttgcgccaggtagttgatcagcgccgggatcgcttcacgcgaatacaactgctggtcatccttgccgtgcaacgcggcgcggtgatggcggaactggccgccgtacaggtccttcatcgcggagccttgcagcaactcgacgtggtagccgtgctcctgcgcacggccagcgcagaacgcttccagtagatgctcttcggcttcggtacgggcgaacaggtatgagccgttgcgcttgagttgcagcccggccacctgcgcccaatggccccagatttcgcggctttctcgcgccaggtcgagcatcggcccaggtggttgaccggtcaccagggcctggccgaagttgcgcaccgaggcgcccagcggcgtggcgctgcgttcgaagaccttgaccttgaggccgcgcctggcggcggcaaaggcgtgggacaggccgaggatgccggcgccgatgatcagcaggtcgctgtggtgtgtcatatcgtgatgtcctgttttgcagaccgccatcgggggcaagccccctcccacagttcgatttgcgaatgccatcagtgtgggagggggcttgcccccgataaggccagtagccccaacgaaaaaccttactgcgctgccactttctccgacttgccgtcatagcgcttgcgccattcggtcaggatgctgtcgcggttcttcgacgcccaggcaaagtcgttcttgatcaagcgctgctcgtagtcggccggcaattcggtctgcggcttggcgatgcccggctgggcgagcacggcaaagttgtccttgtacaggtccatggccgccgggctggcggagaagtcggcgagcttctgcgcggcgtccttgtgcgcggtgcctttgatcacggcggtggcttcgatgtcccagcccaggccttccttcggcaggatgatgtccaacggcgcgccctggcgtttcagctggacggccgggtattcaaacgaaatgccgatcgggaactcaccggaagccgcaagcttgcacggcttggaaccggagtgaacgtactggccgatgttctggtgcaggtcgtccatgtactgccagccctgcttctcgccgaaggtctgcaaccaggcgctgacgtcgaggaaaccggtgccggacgaggccggattgggcatgacgatcttgcccttgtactcaggctttgtcaggtcctgccagctcaccggcttggtcagcccctgtttctcggcttcgacggtgttgaagcagatggtcgcggcccatacgtccatgccgacccaggccggagggttggcggcgtcgcggtagtgcttgccgatcttgtccaggtccttcggcgcgtagttgtccagcataccttgctggtcgaggatcgccaggctggacgcggccaggccccagactgcgtcagcttgcgggcggtctttctcggccagcagcttggcggtgatgatgccggtggaatcgcgcacccacttgatctcgacgtcggggttagcctgttcgaaggcctttttgtaggtcttcaattgctcggcttcgagggccgtgtacacggtcaactcggttttcgcggcaaaggcattcacgctgaatgccgtgagtaccgccgcgaccagcgccaggggcttgaacatggaacacctccttcaggattattggccgggcgcggtctggcgccaggcttgggagcggcgcagtgcgccacgtgaggcccacgccagcagcagcgagacgccggccgacgtgaacaggatcagggtcgacatcgccgccgcaccgcccacgttgccggcgtcgtccatgttcaacacggcgacggcggcgaggatggtgtcggggctgtagaggaagatcgcggcggacacggtggtcatcgccgacacgaacaggtagcgcacgatatccagcagcgccggcaggcagatcggtaccgtcactttcaggtaatgccggtacagcggtgccttgagggacagcgcggcggcttcgaactcggcgtccagctgacgcagcgccgtggtggcggtcatctgggcggtggtcaaatagtgcgcaatggtgcacaccaccagcagggtcatggtcccgtagaacacatgcagcgggttgccgttaaggttgaaaaagaacacgtagcccaggcctagtaccaggcccggcacggccatcggcacgaagctgagcatgcgcagggccaggtttaggcccttctggcccttggttttttccatcaggtaggcgccggtgaagatcagcgcgctgccgatcaatgcggtgcacagggccagggtcaggctgttgcgataggccagccagccgccgccggccgtgtcttcgaactggtaatggttgagggacagcgacaggttgtacggccagaatttcaccagcgaggagtacaccgccatgccgaacaccagcagcaacaccgcgcagatcagcagcacgatggccaggtagcaggcatctctcaggcgcgagggcaccggttgaaacacttgtgcacggccgctcatcgaatcgccgtgacgacggcgcagccaggcatccaccccaaagctgagcagcgccggcagcagcaacaccatgccgatcagcgcaccgcgcccgaactgctgctggccgaccacggccttgtaggcttccagggccagcacctgataatcgccccccaccaccacgggcacgccgaagtcggtgatggtcagggtgaacaccaggcaaaacgcggcgaacaccgcctggcgcgtggccggccaggtgatgctgcgaaacgcccgggccgggctggcgcccatgctggaggcggcatcgaacaggcgtgcatccgccagggacaacgccgacagcagaatcatcaaggcatgtgggaaggtgtagatcacctcccccagcacaatgccccagaaaccgtagatattctccgagagcaacccacgcagcatgccctggttgccaaacaggtagaccagcgcaatgcccggcagcatcgacggcgccatcagcggcagcagcgacataccgcgccagatcgccttgccgggaatcaaggtgcgttgcagggcgtaggcaaacaggtaagccagcggtacgacgatggctgccacgctcagggacactttcaggctattgcccagcagccagtggaagttggcgctggtcaccagctcccgcgccgccaacaggccaccgccctgcccggcctcgctgctgaaaccgcgccagaagatcgccagcaacggcatcaatacagcgatacccaacagcaacagccacagcagtttgccgccgacgacgaaaattctgtcgccggtttcggcgcgggaaacctggcgtggcagcgtcatgacagcggccatctcaggcaaacacctgcaggctgcgcggcggcaaggccacccagatgtcctgggcgcccaggcgcggcatggcttccggggccagttcggcgagcagcgggtggccgggcaattgctccagttcaaagctcatgcggcagcggttgccaaggaaggtgatctcgcgcaccttggccgggaacaggttttcttcatgcaccggcgggttgacgctgatcgcctccggacggcagaacaggcggcccgacttggccacgccagcatcgtcggccaggcgcatgttcatcccgccgacctgggcgtgactggcactgttgcggctgaacggcagccaattgccctggccgacaaactccgccacgaacggcgtggccgggcggtcgtagatctcctggggcgtggcgtattgctcgacctcgccgttgttcatcacggcgatgcggtcggccatcagcatggcttcgtcctgattgtgggtgaccatcagcgtggtgatgcccaggcgccgttgcagttggcgcagctcggtgcacagatgctcacgcacgcgggcgtcgagggccgacatcggttcgtccagcaataacaatgaaggcgcgggcgccaaggctcgggccaaagcgacgcgctgctgctggccgccagacagctggccggggtatttcttttcgctgccgaccaggccgaccagttcgagcatctggccaacacgctggcgcacttcatcacgaccactgccggtgaggccgtagccgatgttcgcttcgacggtgaggttgggaaacaacgcgtaggactggaacaggatgccgtagtcccgcgcctggggcggcagccgggacacatcgcggttgcccaggtaaagctcgccactgtcctggcgttcaaggccggcgatgcagcgcagcaaggtggtcttgccgcaaccggacgggcccagcaggcacaccagctcgccggcggcgacgtccagcgagacgttatccagcgcggtaaacgcgccgaagcgtttctggataccgcgcaccttcatgggcgcgccgggttgggtcagggctgtgttcatgcaaggcacctcatcgaacggatgaaggccatgctaggggggcaatgcgtccctggtgtggcagaaaggcaaaacccggtgatagtggtattggtggatttgggtagggctctcagcgctgagttgcctggtctatcgctatcgggggcaagccccctcccacattcagagcgtgtgaacccgaaaaagtgtgggagggggcttgcccccgatgaggcccgaaaagccaaccaaaaacttaaattggcgacatttcctgcgccagcccaagaaaggccgccggcaaccgcgcgccctttctttccttgaggcagtacagatactcaggaatctgcggtgcattctcgatggtcagcacgcgcaattgcggatcgtgtggcacttcttgccgcgcaatgatgctgatgccaatgttgcgcagcaccgcttcacgaatcgactcgcggctgccgatttccagcagcggtccgaagctcacacctgcgctctgcaacagttcttcggtcaaacgtcgcgtggtagagcccgcctcacgcatcaacagcgtgtgcccggccaatgcgttgagcggcacatggtcgagcttggccaacggatggttgcgatgcaccgccagcaccagcgggtcggtgcccagcacacggcgaatcaggcgtgggtcttccagcagttgcgaggaggcggcgacgtcgacacggtaatcgtccaaggcttctagcacttgttgggagttaccgatttccaccgacacttccacttgcggcaggcgttcacgaaaggctttgaccaggtcgaggatgtagtacggtgccgtggcggcaatcctcagtgcaccctggacctggccattgttgcgtagaaaaaattcgatgtcggcttcttgctgcaacagcgccttgaccatcggcagcagccgcgcgccctcgtcgctgacggtgaggcgacggccgccacggtagaacagctcaacaccgtattggctttccaggttacggatctgggtggtgaccgtgggttggctcaggccgagttttttcgccgcctgggtaatgctgcccaggcgggcgaccatgaaaaaagccttcaactcggcactcagcacaccaccctctcatcgtttatttgcgcaacaggcgcaggccattgaacaccaccagcaggctcacgcccatgtcggcgaacaccgccatccacatggtggccatgcccaggaaggtgaccgccaggaagatcgccttgatcaccaatgccagggcaatgttctgcttgaggatactcgacgtttgccgcgacagacgaatgaaagccggaatcttgcgcaggtcatcgtccatcaaggccacatcagcggtctcgatggccgtgtcagtacccgctgcggccatggcaaaacctatctcggcgcgagccagggccggagcgtcgttgatgccgtcgccaaccatgccaacgcggtgaccttggccgtagagggtttcgatggcttgcagcttgtcggtcggcaacagatcaccctgggcctggtcgatgccgacctgggcggcaatcgcctgggcggtgtgggtgttgtcaccggtgagcatcagagtcttgatgcccagttcgtgcaactgctggatggcttctcggctgctgtccttgaccgtgtcggccacggcgaacagcgccagcgggccggatttgtcgagcagcaacaccacggatttgccttgtttttccagggcgaagagtttctcttccagctccggcgagcacaggcccaggtcttccaccagtcggtggttgcccaggtggtaggtttcgccgttgatctcgccacgcacgccgcgaccggccagggccacgaagttatccacaacgtgggtgggcaggtttttatccacagccgcgttggcgatggccagcgacaccgggtgatcggaacgccccgccaggctggcggccagcgccggtgcgctgtcttcgacgttggggaacagcgccaggtagtcggtttgcaccggtttgccgtgggtgatggtgccggtcttgtcgagggccaggtagtcgagcttgtaaccgccctccaggtacacgccgcccttgatcaggatgcctttgcgcgccgctgccgcgaggccgctgacgatggtcaccggggtggaaatcaccaatgcacacgggcaggcgaccaccagcagcaccagggcacggtagatccagtcgaaccaggcgccggccatgaacagcggtgggatcaacgccacgcccagcgcaaacaggaacaccgccggggtgtagatcttcgagaagctgtcgacgaagcgctgggtcggtgcccgggcgccctgggcctgctccaccgcgtgaatgatgcgcgccagggtggagttgttggcggcggcagtgactttatattccagggagccggcctggttgatggtgccggcgaagactttgtcgcccacggtcttttcaatcggcaggctttcaccagtgatcggcgcctggtcgatggtggattggccagcggtgacttcgccgtccaggccgatgcgctcgccaggctttacccgcacgatggcgccaagatcgatactcttgacctcttgttcagcccaagacccatcagcctgttgcacggtggcctgctcgggcgtcatttgcatcaagccgctgatggcattgcgcgcacggtccagggacttggcttcgatcaactcggccacggtgaacaggaacatcaccatcgccgcttccggccactggccaatcaggatcgcaccggtcaccgcaatgctcatcagggcattgatgttcaggttgaggtttttcagggcaatccagccctttttataggtggtgaggccgccgctgaggatcgacaccagcgccacgatggcaatcacccaggtcggcgcggcgttagtgaagtgcagcacttccgccgccaacgcgccgatgccggacaacgccagcggccaccaatgtttcttggcgggcggttcggcggcgggggtgccttcttcgatgggatcggcctgcatgcccaaggacttgatggcgtcgatgatcggcgcggtactcggcaggtcgtgggtgacgccgaggatgcggttgatcaggttgaattccagctgctgcacacccgcaagcttgcccagtttgttctggatcagcgtctgctcggtggggcagtccatggcttcgatgcggaaggtgctcagccgcgaaccggcggtgggcgcttcgctcaattgcaccaatgccggggccggcgtgccggagcagcaggagccgccgtggccgtggtcatgcacaggggtcaatttcttcgggccatgatcatggtcgtgatcgtgcttgtgcggggtgtggatggaatcgctcattctgtcgcgtccgtaaaggtgcctgttgccaagtaaagaccctgtagccactatagggtcaagcacccatttggagattgttgcgatgaagatcggcgaactggccaaactgaccgactgcccggtggaaaccatccgttactacgagaaggaaggcctgctgccgcccccggcgcgcaccgacgccaactaccgcgtatacacccaggcacacaccgagcggctggtgtttatccgcaattgccgcagcctggacatgaccctggaagaaatccgcagcctgctggggctacgggacagcccccaggaccagtgcgaaagtgtgaatgcgttgatcgacgagcatatccaccatgtgaaggcgcggatcgatgggctgttggtgttgcaggagcaattgctggacttgcgccaacgctgtggcggcggggatcagtgcgggattctgcagcggctggaagtcagcggcagtgtgttggccagtgaggctgagccttcccatgtgggcagaagccacggccattaactcaaacgaagacggttcaaatgtgggagggggcttgcccccgatggggagttccagccacccaatacttagctgatccaccgctatcgggggcaagccccctcccacacaagccacaccttaagaccaggacagccttcagatcgcgacgtcggccttgatgcttgggtcggcgtcgtagcccacgatctcgaagtcttcgaacttatagtcgtagatcgacgcaggtttgcgcttgatcaccagctccggcagcttcttcggcgtgcgcgccaactgggtgcggatctgttccatatggttgctgtaggcgtgggtgtcgccggtggtgacgatgatctcgtgggggatcaggtcgcactgctgggccagcatatgggtgagcaaggccagcgcggcggtgttgtacggcaggccgaggaatacatcggagctgcggatgtacaactgcatcgacaggtgaccgtcgtgcacgaacgcctggtacagcaggtggcacggtggcagggcttgtttgccgttgcgcgcgttttcctgcgggctctgggtttcgtcgggcaggtactcgacgttccagccgtggaacaggatgcggcggctgttggggttggtcttgagggtgtggaccatgtagtcgatctggttgatcgtgccgccgtccttggttggccaggccgtccactgctcgccgtacaccgggccgaggtcaccctcttcggtggcccattcgtcccagatgcgcacgccgttttcgttgagccacttgatgttggtgttgccgctcaacatccagatcagttcattggcgatacttttgaagtgaagcttcttggtggtcagcagcgggaagccgtcggccaagttatgccgatactgacgggcaaacacggccttggtgccggtgccggtgcgatcgcccttggtcaatccattggtcacgacgtcgttcagtagctcgagatattgcttcatgtgggtacccgtatcgttgaagcccaggccagataaagacctgggcattcgaatttaaagcgcggtgttcttcaaaggttgcgggcgattgtacgcccaccacagcaggcccaggccgccgatgatcatcggcaggctgaggatctggcccatggtcacccaaccgaacgccagatagcccagttgcgcatccggcacgcgcacgaactcgacgataaagcggaagatcccgtagaacagcgcgaacatgccggaaaccgccatggtcgggcgcggtttgcgcgagaaaatgtagagaataaggaacagtgccacgccttccaacgcgaactggtaaagctgcgacgggtggcgcggcaattgcgccgggtcgctgaacggcgggaacaccatggcccacggtacgtcggtcggcttgccccacaactcggcgttgatgaagttgccgatacgcccggcgcccaggccgatcggcaccatcggcgcaacgaagtccatcagttggaagaacgacttgccgttacggcgaccgaaccaccaggcggcgatcatcacaccgatgaacccaccgtggaacgccatgccgcccttccacacttcgaagatcagtgtcgggttggcgatatacgccgaaaggtcgtagaacaacacatagccgagtcgtccgccgacgatcacccccatcgacagccagaaaatcaggtcggagagtttctccttggtccaggtcgggtcgaaccggttcaggcgtcgggaggccagaaaccaggcaccgccgatgccgatcaggtacatcaacccgtaccagtggattttcagcggaccgatggccagggccaccgggtcgatctgcgggtaaggcagcattgcgactcctcgttaaatcattcgttaggcgtgcggaccatgccggtgtgcgattaagcctgcgttacagccgctgtttcaaattaagaagttcacacgcaccgaaacgccaggcatgttaacggatggaaggcgtgccgcccaacttcgatacgatggaacgcctgccgctgtatgagtagagtgacaaaaaacacaaaagggatcgcctgatgtgcctgattgtttttgcctggcggccgggccacgcccagccgctgatcgtcgcggccaaccgtgacgagttctacgcccgccccagcctgccgctggcccagtggccggatgcgccagaggtgtacgccggtcgtgaccaggaagccggtggcacctggctgggcgtgaatgccgatgggcgctttgccgccctgaccaatatccgcgacccgcatcagccgccggcccgtaagtcacggggagagctggttgcgcgatttctcaacggttcgctgccgattgatgagtatttagccgacgttaacggccgttcaattgaatatgccgggtttaacctgctggtgggcacgcgggatgagctgtggcattacaacgccaatcacaccgagcccacgcgcttgaaggccggagtgtatggattatccaatgcggggctggatacgccgtggcccaagttgctcaaggccaaggcggcgttgggcgaagtattggcggacccgcagccggaggccttgctggaaatcctgagtgatccgcagacggcaccgtttgccgatttgccggataccggcgtggggttggcgacggagagcctgctgtcgagcgtgtttattgccagcccgagttacggcacgcgggcgagcacagcgctgatagtgaatgccgacggaacgcggcggatggtggagcgcagttttgggccgcatggtgggcggctgggcgaagtcgaaatcaacctataaccacaccgaaacccaatgtgggaggggcaagccccctcccacatttttaaagggttttggcagacgccgggttgatcatccgcgtcagccccaggttcttcagggccaactgcaacgagctgtggataacttgcgggttgtcgatagtcatcaactccgccagcagctccttggccatgctcagttccacctggcgcagcatccatttcaccttcggcaagttggtggcgttcatcgacaggctgtcaaagcccatcgccatcaacaacactgccgccgccgggtcaccagccatttcgccacagatgctcaccggcttgccttcggcatgggcgtcgcgcaccacatgttgcagggcttgcagcaccgccgggtgcaggtagtcgtagaggtcggccacccgtgggttgttacggtccacggccaataggtattgggtcaggtcgttggaacccactgacaggaagtccacctgccgtgccagttccttggcctggtacaccgccgccgggatttcgatcatcacaccaatcggcggcatcggtacgtcggcgccttcgtcgcgtacttcgccccaggcgcggtggataagatgcaacgcctcttccagctcatgggtgcctgaaatcattggcagcaggatgcgcaggttgttcagaccttcgctggccttgagcatggcgcgggtctgtaccaggaagatttccgggtggtcgagagtgacgcgaatgccgcgccagccgaggaacgggttgtcttctttgatcgggaaatacgacagtgacttgtcgccgccgatgtccaggctgcgcatagtcaccggcaacgggtggaaggcctgcagttgctcgcgatagatcgccagctgctccttttcactcgggaaacgctggttgatcatgaacggcacttcggtgcggtacagccccaccccttcggcgccgcgctgttgcgcacgggccacgtcggcgagcaggccggtattcaccagcaacggcacacggtgaccatcggtggtcacgcatggcaactcgcgcaatgaatcgaggcccagcgccagttgcttctcttcctcaaccacttcggcgtattgcttgcgcagcacttcgctggggttggtgaacacttcaccgcgatggccatcgacgatcatgtcgataccatccaccttggaatacggcaggtccaccaggcccatcaccgtcgggatgcccatggcccgggccaggatcgcgacgtgggagttacccgaacccagcaccgagaccaggccaaccagtttgccttctggcacttcgccaagcatggtggcggtcagctcttcgctgatcaggatggtgttgtcggggtagaccaggttggtggtgcgatcttcctgcaggtacgccagcagacggcgaccgaggtcgcgcacatccgaggcccgttcgcgcaggtaggcgtcgtccatcagttcgaaacggttgacgtgatcggtgaccacctggcgcagcgcgccctgggcccattggccggtcttgatcacggtcttgacttcattacccagcgacgcgtcgtcaagcatcatctggtacacgtcgaacagcgcgcgctcttcggggcgcagttgggtggccagcttggtcgacaggttgcgcatgtcggcgcgcacgccttccagggcggtcttgaacaatttgatttcagcgtcgatgtcggtgacggtcttgtccggcaccacgtccagatccgccggcggcagcatgaccaccgccgtaccgaccgcagcgcctggcgaaccgggtacaccaacgaacttggcttcctggatacccttgccttcgcgccccaggccgcgaatcgagccggtggcttcggcgtgggcgataaccccggcgagttgcgcgctcatggtcacgaggaaggcttcttcaccttcgtcgaattggcgacgttctttctgctggatgaccaacacgccgacgacgcggcggtggtgaatgatcggcgcaccgaggaacgaggcgtaacgctcttcaccggtttcggcaaagtagcgataacgcgggtgatcggccgcgttttcaaggttcaggggttcttcacgcgtccccaccaggcccaccagaccttcattgggcgccatgctgaccttgccgatggagcgcttgttcaagccctccgtggccatcagcacaaaacggttggtctcggggtccagcaggtaaaccgagcagacctggctgcccatggcttccttgacgcgcaacacaataatccccaacgccgccttgagatccttggcggagttaacttcctggacgatcttgcgcagcgtattgagcatggctcggggtcgaactccgtcgtcagtcgcgcgctaaaaggcgcggggcaagctctttgagcgcgcgacgataaacctcgcgcttgaatgtcaccacctggcccaacggataccaatagctgacccagcgccagccatcgaactccggtttaccggtcaaatccatccgcacccgctgctcgttggagatcaggcgcaggagaaaccatttctgcttctggccgatgcacagcggttggctgtgggtacgcaccaggcgttgcggcaaacgatagcgcaaccagccacgggtacaggccagaatttgcacatcttcgcgctcaaggccgacttcttcgttcaactcgcggtacaaggcgtcttcaggggtctcgtcggggttgattccaccttgaggaaactgccaggcatcttggttgattcggcgagcccatagcacctgtccggcatcattcgtaagaataatcccgacattaggacggaaaccatcggggtcgatcacggcaacaacctcgcaaacgcatgtcgccgcattgttccacaaaggttgatgaagcggcaacgaggcttcgtaccttatgtgcactcttgtgaaaagaccgtattctggacgcctttttacagacttttcagcgagtaactgcaatgcgcctggctttattcgacttggacaacacccttctcggcggtgacagcgatcacgcctggggcgattacctctgtgaacgcgggattctcgacccggtggcctacaaggcccgcaacgacgagttttaccaggactacctggccggcaagctggacaatgccgcctacctgaacttctgcctggagatcctcggccgcaccgagatggcccagctggacgagtggcacaacgactatatgcgcgactgcatcgagccgatcatgctgccgctggccattgagctgctggccaagcaccgcgccgccggtgataagttggtgatcatcaccgccaccaaccgtttcgtcaccgcgccaattgccgcacgcctgggcgtggaaaccctgatcgccaccgagtgcgaaatggaaaacggccgctacaccgggcgcagcaccgatgtgccgtgcttccgtgaaggcaaggtgacgcgcttgaaccgctggctggaagaaaccgggtacagccttgaagacagctacttctatagcgactcgatgaacgacttgccgctgctggagaaagtgactcacccggtggcggtggatccggatccgaacctgcgggccgaggccgagaagcgcggctggccggtgatcacgctgcgcagctgatgaagccatcgggggcaagccccctcccacacttgatcgggttcacacggtcaaaatgtgggagggggcttgcccccgatgcagacgactcggtccaaagccttaaaccggcttggcgcccatcagaccggcaatcgccacaaaccccaccagactgaccaccgccagcaccagcgtgaagttcaggctaccgccctcgcctttgcccaggcgattgagccgcgccaccagccagaaccaggccagcgccgccacggtatagaggatgctggagcccaggatccaggtctggcccagcggccagcccaccaggtgcaccagccaccagccggtaaacggcatgctgaccacgcatacgcccatcagcaaccaaacaaaggcccacgggcgttgcacggtcgccgccgggccggcgctgcgtttgcgccaggccagcagcgccaggccaaggccactgagcagcaacaccacggtggctgccatgtggataactttcagggtggtcagggtttccatgtgtcgttttccttaaaggccgccccctcagcgtagtcgctcaaccgaggaacagtttgtaggccgggttatggctttcatcccagtacgggtagccgatggcttccagggcggccggtaccaggtgacgttcatccgccggcacttgcagcccggcgaccacacggccgtctgccgcaccgtggttgcgatagtggaacatcgagatgttccagcgcccgcccaatttgttaagaaagttgaacaaggcccccggacgctccggaaactcgaagcgcaacaccacttcatcgctaaccttggccgcatgcccgccgaccatatgacggatatgcaacttggccagttcgttctcggtcaggtccagcaccgggaaaccctggctggtcaggctggcgatcagggcactgcgcggatcgttttccgggtgggtctgcacgccgacaaagatgtgcgcctcgctgccggagtggtagcgatagttgaattcggtgatctggcgtttacccacggcctcgcagaacgccttgaagctgccgggcttctcggggatggtcacggcgatgatggcttcgcggccttcacccagctcggcgcgctcggccacatggcgcaggcggtcgaagttgacgttggcaccggagtcgatggcgaccagggtctgcccggtgacaccacgggtttcaacgtacttcttgatcccggccacgcccaaagcccctgccggctcggtgatggaacgggtgtcgtcgtagatgtccttgatcgccgcacagatctcgtcggtgctcacggtgatcacttcatccacatagtccttgcagatgtcgaaggtgtgctggccgatctgcgccactgccacgccatcggcaaagaggcccacagtcggcaacaccacgcgctcgccagcagccatggcggcttgcaggcagttggagtcgtccggctcgacgccgatgatcttgatctccgggcgcaggtatttcacgtacgccgcaatcccggcgatcagcccgccgccgcccaccggtacgaaaatcgcgtccagcggccctggatgctggcgcaggatctccatcgccacggtgccctgcccggcaatggtgtgcggatcatcgtaggggtggatgtagacgtagcctttttcgtcgaccagtttcagcgagtaggccagggcttccgggaaggaatcgccatgcagcactactttgccgccgcgggagcgcacgccttcgaccttgatttccggcgtggtcttgggcatcacgatggtggccttgacccccagcaccttcgccgccagggccaggccctgggcatggttaccggcagaagccgtgaccacgccgcgcgcacgttcttcggcgctcagttgggtcagcttgttgtaggcgccgcgaatcttgaacgagaacaccggctgcaagtcttcacgcttgagccagacctggttgcccagccgctcggagagctggcgggcggtctgcaacggggtttctacggcaacgtcgtaaacgcgcgaggtgaggatctttttgacgtactgttcaagcatcggcggatatcactgggcgggttgggcagggccaaggagtctaacccagcgtttgggcgggcgaccacacgaatccagaggttttgttgggttatactcgcgcccctcgataactccccgcccgttccggagcccgcatgacccaggatcaactcaaacaggcagtggcccaggccgctgtcgatttaatccttcctaaactcgacgacaagagcatcgtcggtgtcggcaccggctccaccgccaactgctttatcgatgcactggcccagcacaaaggcgcgttcgacggcgccgtggccagctccgaagccaccgccgcacgcctcaagggccacggcattccggtgtacgagctcaacaccgtgagcgacctggagttctacatcgacggcgccgatgaaagcgacgcgcacctgaacctgatcaagggcggcggcgcagccctgacccgcgagaagatcgtcgccgccgtggccaagaccttcatctgcatcgccgacgccagcaagctggtgcccgtactcggcgccttcccgctgccggtggaagtgatcccgatggcccgcagccacgtggcccgcgagctggtgaagctgggcggcgacccggtgtaccgcgaaggtgtgctgaccgacaacggcaacatcatccttgacgtgttcaacatgcagatcaccaatccggtggagcttgaaactcagatcaacgcgattgtcggcgtggtcaccaacggactgttcgcggcgcgtccggccgatgtgctgctgctgggcaccgccgaaggcgtcaagaccctcaaggcctgagaacaccgctgagctaaggtgggagggggcttgcccccgatgagggagtgtcagtcaacggatgcttggctgatacaccgctatcgggagcaagccccctcccacattggttcagcggggcttcttgaagacgtagaacaggttcggctcgctgacgaggtacaacgcgccctcgtcatccatggcgatgccttcggcctgcggcactcgcttcgtcaggccatggcgcccgttgagcagtgacagactgctcagcgggcgaccgtcgatatccagttccagcaccaggaacgactcatccgacagcgccagcagatggccgctgcgctcatcgtattgcaggctcgacaggtcacgcacaaacaacccggcgtcgcgcttggggttattgatcacgtgcaccgagtaggttttttccggtttgaaatgcgggaagccatgcacctcatagatcagcatcgggtcgcgctccttggccacgaacaggcgcttgcccaccgagtcgtaggccaggccttcaaagcccttgttgccaccgacatgcacacccagggtcatctgctccgcatcagcggcgtcgaggaattgggtatcgtcgtccacgtgcaccttgatcagccgctgctggcgctcatcgctgatgacatagatgttgtcgctgatgaactccacggcttcggcatcgccaaacccgatcaaggggatgcgtcgcaggatcttgccttccagggacaactcgatcagctcggcgtttttattggtgacggtgaacaggcttttgcgcaccgggtcgtaggttagggccgacacatcgtcgtcgagcccctcaatggcctgagcctcaagcgtgacgcggtagtccgccagcccgatggagcgttcgtccgctggctggcgccatacctgccaattgaaccaggtgcgttcaaacagacgaaaatgctgcgcaacggccccggcgctgaccagggtgatcagcgcaagcatgataaacaggggtttggggcgggctagtcgttgcatcgggcgggctcaaagtcaaaagtggcgaatgaatatcacgcccgtctgaatttaaacttaaacacgcccggatgtctggcagatgccgctcacagagacctatctgacgtaatcggtgtgctatttctgcttttcgaaccggtagaacagattgggctcactgacgatgtacagcgtgccctcctcgtccatggtcaccccttcggcacggggaatggtgtgcttgatgccgttgaaaccgccgagcaaggtcatgaagctgacttgctggcccttctcgtccagctccagcagcaggtgggagtcggccgacagcaccagcaaatgcccggtacgcgggtcaacagccagggccgagagattgcgcatgtccagttctttgctggccagcttttgtttatcgcccgccagggtcaagccgccgtcgcttttccaggtgaacaacgcgggcgggcgctcttcgccaaggatcaactgctggttgcgcttgtcccaggtgatggcttcgaaggccttattctggtccttggacgggccgaggtcatagctggtgaagtcggccttgttcagttgggtggtgctcgcatcgaccttgacgatggtcagggtgtgctgccgctcgtcgaccaccgccaacaggccattttccattaccgtcacgccttccgggttgtcccagccgttgagcggcatcttgcgcagcacatcgccttgcaggctcaactccgccaggaacgggtttttgcccatcacggaaaacagggttttggtctgtggattgtaggcaacgtccgacgcttcgtccttctccatccccggcaaaagcttgccatcgatgaccgcatggtagtcaggcagccatacgctctgctggcgttcggccggcgtctcaaagcgctccagcacccacagcacaccgcgatcgtcccagtgcagggcccaggccacgccatacaggatcacccctgtcagcaacagccaggaataccagcgcatggcaaaacgggaacgcggcttgggtgaagcggagggcagggacacggccattgggcgctttttccggaaagtcagcgttaggtgatagcacaggaacaacgggcctgcgcgcacgaggctgaggattatccggatggcgtgtgaaaaaaatgcaaaagcctgagatgtgggagggggcttgcccccgattgctgagtgtcaggcaacagatgtttgactgataaaccgctatcgggggcaagccccctcccacaatgttgaccgcgttttgtcagtgcttaacgaacaacgctttcaaagcgattctggcccgccagttccagcaccaactcatcccccacattcaacgggcctacaccggccggcgtgccggtgaggatcacgtcgcccgcctgcagcgagaagcagccggccatgtgctggatcatcgggatgatcgggttgagcatctgcgcgctgttgccgtcctggcgcacttcgccattgatgctcaggcggatgccgatgtcggtgacatcggcaaaggtgctgcccaccacgaacggtgcaatcaccgccgcgccgtcgaaggacttggcgatttcccacggcaggcccttggctttcagctcggcctgtttgtcacgcagggtcaggtccagggccggggcgaagccggagatagcgtccagcacttcttcacgactgggcttgttcgacaaaggcttgccgatcaacaccgcgatttccgcttcgtaatgcaccgaaccgcgttcggtcgggatgctgaaaccaccttccaacggcaccacacagctgcccggcttgatgaacagcaacggctcggtcggcgccgggttatccagttccttggcatgttcggcgtagttacgcccgatacacaccactttcccgaccggaaagtggatgttggtgccgtcgacatacttgtgctggtagctcatggaacgactccttcagggcggttaaacagcgaagatcttgccagggttcatgatcccgttcgggtcgaacaccgctttcactgccttcatgtattcgatttcaaccggcgagcggctgtaggtcaggtaatcgcgcttggtcatgcccacgccgtgttcggcggagatcgaaccgttgtacttcgcgacggtttcgaacacccacttgttcacggtggcgcacttggcgaagaactcgtccttgctcaggttttccggcttgaggatgttcaagtgcaggttgccgtcgccgatgtggccgaaccagacgatttcgaagtccgggtagtgttcgccgacgatcgcgtcaatttccttcaagaacgccggtactttggagacagtcaccgagatatcgttcttgtatggggtccagtgggaaatggtctctgagatgtactcgcgcagtttccacaggttgtgcagctgggtttcgctctggctcatcacgccgtccagcacccagccctgctccacgcaatgctcgaaggtttccagcgcgtggttggcgacttcttcggtggtggcttcaaattccagcagcgcatagaacgggcagtcggtttcgaacggcgccggcacatcgccacggcccatgaccttggccagggccttgtcggagaagaattcgaaggcggtcaggtccagtttgctctggaacgcgtgcaagaccggcatgatcgagtcgaagtcagtcgtaccgagcaccatggcggtgaggttcttcggcgcacggtccaggcgcatggtggcttcgaccacaaagcccagggtgccttcggcgccgatgaacagctggcgcatgtcgtagccggtggcgttcttgatcaggtcgcggttcagctccagtacgtcacccttgccagtgacgacctttatgccggccacccagttacgggtcatgccgtagcgaatcaccttgatcccgccggcattggtgccgatattgccgccaatctggctggaccccgacgaagcgaagtccaccgggtagtacaggcctttttcttcggcgacgttctgcaattgcttggtgaccacacccggctggcacacggcggtgcggtcggtgaggttcacgtcgaggatctggttcatatagtcgaacgacaccaccacttcgccgttggccgccacggcagcggccgacaggccagtacgcccaccggatggcaccagcgcgaccttgtgggtattggcccaacgcacgatggcctggacctgctcagtggtcttggggaagacgatggcggtcggcgcgggtgcgaagtgcttggtccaatccttgccgtaagcctccagggagtctgcatcggtcagcactttgccgggctcaaccagggtctttagctcatcaatcagggcaggatgggtcatcgacagaactctcgaacaattcatggtcatcctgagaacgcttcacgtcgcaggaatgagtgtttagcggggcgcgtatgctagcataccgcccccgcaggacagagcccaagggcgtttctgcggtgacggctttcctgccgtccgggtcagcttaagcgatccgattccctgccatttttctccgggatacaggtttacgcagatgagcaagacttctctcgataagagcaagatcaagttccttcttctggaaggcgtccacccatcggccgtcgaagttctgaaggccgccgggtactccagcattgagtacatcaccagttctctgccggaagcccagctcaaggaaaagatcgccgacgcgcactttatcggcattcgctcccgcactcagctgaccgaagaaatcttcgatcacgccaagaaactcgtggcggtcggctgtttctgcatcggcaccaaccaggtcgacctctctgctgcgcgcgagcgtggcatcgcggtgttcaacgcaccgtactccaacacccgttccgtagcggagctggtgctggccgaggccatcctgttgttgcgcggcattcccgagaagaacgcttcctgccaccgtggcggctggatcaagagcgcggccaactccttcgagatccgtggcaagaagctgggcatcatcggctacggctcgatcggtacccagttgtcggtcctggctgaaggcctgggcatgcaggtgttcttctacgacaccctgaccaagctgccattgggcaacgccacccaagtggccagcctgaccgagctgctgggcatgtccgatatcgtgaccctgcacgttccggaaaccgctgagacccagtggatgatgggcgagaaggaaatccgcgccatcaagaagggcggcatcctgatcaacgcggcacgcggtactgtggtcgaactggacgccctggccgacgcgatcaaggacaagcacctgatcggcgccgccatcgacgtgttcccggttgagcctcgctccaacgacgacatcttcgaaagtccgctgcgtggcctggacaacgtgatcctgaccccgcacatcggtggttccaccgctgaagcccaagccaacattggcctggaagtggccgagaagctggtcaagtacagcgacaacggtacctcggtatcgtcggtgaacttcccggaagtggccctgccggctcaccctggcaagcaccgtctgctgcacatccaccagaacatccctggcgtgatgatggagatcaacaaggtcttcgcggaaaacggcatcaacatctccggtcagttcctgcagaccaacgagaaggtcggctacgtggtgatcgacgtcgacgccgagtactcggacctggcgcaagagaagctgcagcacatcaacggcactatccgtagccgcgtgttgttctaaggtttcaaccgcaccacgaaaaagggagcccctcggggctcccttttttgcatctgaacaaatcttacttgacgttaaccgtgatcactttcgaggctacagtgggctcgaactggcggtgcacgttatcgcccgctaccagctgcaaggtgtgtttgcctggggtcaatgtcagctcggtttcggtttgcgccttgccgaaatgaatcgaggtggcagtggccgggatagcctcgtctgctttgagcgacgtcacgtcctggtcgaccagcaggtgatggtgaccggcaccgggcacctgcttgtcgatcggttccaggtccagacccttcatgccaaatttgacggtgaaggtcttgtcgacggtcgcgccatctttgggcgatacgataaacacctcggcgcctttgggggcgggggtgcgcggaacatcagcagcattcgccaacatcgaagcacccagcatcagggaggccagggtggcacgggacaaaagggctttcattcgcttctccagtttttctgtgaaatctgtagggttatgacaacttcgcgacaaattgctgtccaaggcactcaacaccatagcaaagcgatgctgaccggcgcctcgcacataaaaattctctaggagtgaccatgcgcttttcgcctggcctgttactgctgcttccccttctgagccccctggctcacgccgaactggtcgatgatgtgttcgatcgtggcgaactgcgcatcgcccttgaagccaatacgccaccgttcaacttcaaggacggcgacaaactcaccggttttgaagtggaactgggtgaactgctggccaaggaaatggacgtgcgctcctcgttcatcaccaccgatgacgccgacttgctgccaggggtggcaaccggcaagtacgacgtggccatcaaccatatcgctaagactgccgaccttgaggatcagttcgatttcagtgaggcttatcgcgagaagcccgatttggtgatcccgttccaaaagggtaacccggcgttcaagacgagcctggacggcgcgctgaagcgggtgaaggaggatggccggttaaaggcgctgtcgcagaagtggtttgacgcagaagccccgactacaactgcgccagtgcctgcgcagcctcaggtaactccaactcactgaacacctgcacgccgtggcgcttgagcagcgccgcggttacgccctcgccactcactttcacgccggtaaaggtaccgtcataggtgagcaggttgccgcaggatgggctattggccttgagcacggcgatgcggatagcgtggcgttcaaccagcgccagtgcctggcgggcgccatcaaggaacgctgcgctgaaatcttcgccctcagccgtcagcacctgggcacgcccctcccacacatccacgccctgcccgcctgggatctcggcagcaggtcgtggcgttggcaaaccacccgacacttccgggcagatcgcaaccacacgcccttcggcctgccacgccgccaattggtcgaacggcccgctggccccgccgtcgtaacgcaccttgtgcccgagcagacagcggctgatcagaatcttttgcatgtttaaaacggctcgttgccccgccggcgaaaccagccggtgagggacaggcgttcgcgcgtagcgggcatcacttcgtggggcacctcgcccgacaggaacaccaccaggcaaccgccggtgggcaccacatcgtattcgacgccgtccttgaggtacatgcgcaactggccgccatgttcgggcagccaggcgtcattcaagtagatcaccgccgagaccatgcgccggtcatcgtcgcggaaacggtccaggtgcttgaggtaaaaagcccccggcgggtacatcgcgaagtggctctcaaagtcttccaggcccaggaacaggccacggttcatggcgaggcgcaggctgtccatcaccgccatgtaagtgtcgcaaaccgccgcatcgccctcttccagccactggatgtggtcaccgcgaatgccttctcgaatctcctgggtcggcccccgccctaccgctgccggggccagttcaccttcggccttgcgtttacggcactcagccgccagttccagggtcagagcctggggcaggaagccgtcctgtcgcgaccagcccttttcggccaggtcgtcgacaatacgttgcagcaaggggtgatcgaggggtatttgcatggcgcgcatagtatccatacgcctgtgaatccgacagagccgccgagcgtctgaatgcactttagtcaggtgactgataggacttctcgacaaatcctacgcccgacacggacaatagtggccgactgacaggagtccctatgcgtcgtttgtttttttccttgctgatgttctgcgttttgcccgcctgggcagacggccatgaccagttgtacaaggtcgccggctgggccgaacaacgtgcgcatttcaatgacgccctcagtgccgcccagcaacgctaccgcaatagcctgccgccagcggtgtaccaggcgctggtggacaacagcaataaacgcttcgccgcccaggcggtggaccagcgtgccgaagcgcaattgcgcaagcacctggcggaccctgcgcctgccttggcgtttttccaatcacccctgggccgcaagattgtcgccgccgaattgctcgccacccgccgcgaccaactggcgaaaaatgcccagggcctgccgaaaatcgaggccgacgccacccgcagcctgatcatcggccacctggcccaggccctgccggcccgcgaagccggcgcggaagtcagcctggcgattgccggcgtggcggccgacagcctgagccagatgatccccggcctgctgggcggcggccaggcccagggtatgttgaatggccaacgcgagcggttgatgcagcagatcgacaaggacctgaacaacacgctgctgtacgtttatcgggatctgtccgacccggagctggaagaattcgcgacgtttgcggagtcgccggagggcaaggcgtattaccaggcggcacttgccgctattcgcgccgggctggcggtcgggcaaagcacttccagccttacgcagtaaaaagtgtgggagggggcaagccacctcccacatttggatcgcgttagttcaggtgacgggtgagatagctgaagtactgctcacgaatctccggaatctcattggccagatgatgcctgccacgcggcagcatcaacacctcgggctggtcgaacttgctgcgcaacacctgcaggttgtgctgccaatccacggtcatatcctcttcaccctgcacaatcaccggtcgccgagggctgcgcggtgcggcttcgatgcgtttgatccagcgcgccaatgcacccacccaggcggtcggcaattgccgcggctgcagcgggtcgacttcaaggaacggtttgaacgcggggtcgtgggtgttttcgctgaaccgccgcgcaatgcctttgacgaatgggcgcagcaggtaataactgacctgcgaccaaccccaggcacgcggccgcaccaacggtgacagcaggaaggtcttgccctgggccgggctgtcggcgccgtggttgagcaggtggtccaccaccaccgcgccgccggtgctttgcccgaacaggtgccagggttgcggcaactgcaatgcttcggcctgggtaaacagcgcccgcaccacgtgctggtacaccgcgaaatcatcgatgctggcgcgtgcgccgctggacagcccatgcccgggcagatcgcaggcgatcaccacaaaaccctggtccagcgcccacttcaccacatggcggtacaaccccatgtggtcgtagaagccgtggaacatgaacatcgtcgctacaggcctgggcggccaccacacctgcgcgaccacctcgaaaccgtccacctcgaagcgccccaggcggctctcggcctggtccagcccgtagaaacgctggtagacccgtgcctcggctgaaagcggttgcgcatccaccaggggccgcaagctttcgcgcagatgatcggggtcaaaggtaacgggcataaaggcttccagactggcggcgaagatgaatatcgagctgcgatattcatctgtcaggacaagcatggcaagctacgcgaccttcgaggatacatctgaatgcgaccgccctaccgcaccgccctattcgccagcctgatcctggttatctgcgtcggcgtgctgtgggcggcgtatgactggttccagggccgctacctgcgcgccttcagcgaacacacggcggtgttttccggcgacccattgaagctgcccgccgacctcgccggccccggcccgatccgcctggtgcacttctgggacccggcctgcccgtgcaacgtcggcaaccagcagcacctgggcgagctgatcgagcaatacgcgccccaaggcgtcgagttctacgccctgcaaaagcccggcagccacggccaactgcccgacaacctgcgcacgatgaaaaccctcaccaccctgcccggcgccgaccaggtgccggccagcccggccgtggggatctgggatcgcacaggcaagctcgcgtatttcgggccctacagcgagggcctcacatgcaactccagcaacagcttcattgagccgatcctcaaggccctagacgcgggacgccagataaatgctactcacaccctggcagtgggctgctattgttcgtggccaaaaggctcgtaacccgcctctctcttggtaaggaatattcatgaagcgcgtcttgcaggtgttcgcggttctggtcgtgctggctgcccttggcgcaggcgcgtacgtctatagcaaacagcccacccgccagggcacggtgacgctggccaacctgcaaggctccgtcacggtgcgctatgacgaccgtggcgtgccgcatatccgcgccgagaacgaaaacgacctgtatcgcgccctcggctatgtgcatgcccaggaccgtctattccagatggagatcatgcggcgcctggcgcgtggtgaactggccgaggtgctgggccccaaagtgctggagaccgacaagctgttccgcagcctgcgcattcgcgaccgcgccgcgacctatgtggcgcaactggatcatgagtcggcgcactggaaggccctgcaggcctatctggacgggatcaaccagtatcaggacagccacgcccgcccgatggagttcgacgtgctgggcatccccaagcgaccgttcaccgctgaagacaccatcagtgttgccgggtacatggcctacagctttgccgccgcgtttcgtaccgagccgttgctgacttacgtacgcgaccaattgggcagcgactacctgaaagtcttcgacctcgactggcaacccaagggtgcgctcaacctcgccgccagcgattggcagaccctcggcgccctcgcctcactgagcgaacaggccctggccgacaacggcctgccgcagttcgaaggcagcaacgcctgggccatcagcggcaaccgcaccaagagcggcaagccgttgctggcgggtgacccgcatattcgtttctcggtgccatcggtgtggtacgaagcgcagctgtcggcaccgggttttgagctgtatggctatcacaacgctctggtgccgatggcgttcctgggacacaacctggacttcggctggagcctgaccatgttccagaacgatgacctcgacctgatcgccgagagggtcaacccggacaatcccaaccaggtctggtaccacggccagtgggtcgacatgacccgcaccgagcaacagatcgcggtgaagggccaggcgccagtgacgttgaccctgcgccaatcgccccacggcccgatcatcaatgacgtgctcggcgagaacgccggcaacacaccgattgctatgtggtgggcgttcctcgatacccagaacccgatcctcgaaggcttctaccaactcaaccgcgccgacaccctggccaaggcgcgagccgctgcagccaaggtctccgcgccgggcctgaatatcgtgtgggccaacgccaagggtgatatcggctggtgggcggcggcgcaattgccgatccgcccggccggagccaaccccggtttcatcctcgatggcagtaccgaacaagccgataaactgggcttctaccccttcaccgccaacccccaggaagagaacccggtgcgcggctatgtggtgtcggccaatgctcagcccgtgtcacccaccggcatggaaatccccggctattacaacctggccgaccgtggccagcagttgaatgcgcagttgagcgacaagagcgtgaagtgggacgtgaacaacagccaggccttgcagctgggcaccaccaccgctttcggcccgcgcctgctggcgccgctgctgccggtactgcgtgaggtggtcaaggacccggcgcagctgaaactggtggagcagcttgccagctggaagggtgactacccgctggactccaccagcgccacgctgttcaaccagttcctgttcaacctggccgacgcggccttccacccgaaactcggcgacggcatgttcaagaccctgctcaccacccgtgtgatcgacgccgcgctgccacgcctggccgccatgccggattcgccgtggtgggacggcaagcgcgctgacaccgtcaagctcgcctgggacaacagcctcgcgcacctcaaggccacccttggcgatgacccgagccaatggcagtggggcaccgcgcataccctcacccacggtcatccgttgggcatgcagaagcctttggacaaggtgttcaacgtcggcccgttccctgccccgggcacccatgaagtgccgaacaaccagtcggccatgatcggcccggcaccgtggccggtcacctacggcccctcgacccgtcgcctgatcgatttcgccgacgtggcccacgcgctgaccatcaacccggtcgggcaaagtggcgtgccgtttgaccgccactacagcgaccaggccgaaacctacatcgaaggtggctacgagcaggcgcacttcactgacgaggaagtcaccgccaacacccgtggcaccctcaagttgctacccgcccgatgaacgcaaacgccccggcgcctcgccataggtttccttgaatttcttgctgaacgccgcctgggactggtaacccacctgggcggcgatatccagcaggctcaggtgtgactggcgcagcaggttgaacgccagctccatgcgcaattgggtcagcagcacccacggcgatacgcccgcgactttcacaaaggcgcgcatgaaggtggcgcgtgacatcgtcgcagcggccgccaggctgtcgatggtccactcataccctggatcggccagcatggcttgccaggccttgctcaggcgcttgtcggtaagcaaggcgaaggtgccggcgaccggtgcctgacgggcgagccaggcgcgcaggatcagggtgaacagcgccgatgacaatgcatcgataaacgagcgggcgccgagttgctggccgtccgcttcgctgcgcaataacgcgatcaacgccgccagttgcccgtcgccgtgccactcgcggctggacacaaccaggtattccggcaacgcgccgagcagcagcgactggcggttgtagtgaaagctgccgcagagcatgtccaggtccggctggtcaccgcccaggcggtgcacggtgagcacaccgccttcgatgaccttgggttgcatcggccggatccgcgcgccctggctgcgcagcaaatgcgtggcaccgccgggcatcagcaaaatatcgccgtgctccagggtcacttgctgcccacccgacaactcggcgcggcaggtgccactgagcacgatgtgatagggcgccatacccaggctttccggcgcatggtccaaggcccagtcgccctggaactggcagcgcagatccagactgccgcgcaggttggccagcgcgataagcgtgtcgatcgaattcatttgcgagcatcggtcaaaaacatgagcggattgaacaataacgccgcccccgaacggaagacactggctccacaccaccctacccgttcaggagttaccgcaatgttcaataactggtccgacttgctgcctaccgtgaagaaagcctttggcgcgctgggcaagagcaacccgaagatggtcaaagcctacatggcgctgggcgaagctgccgaggaaaacaacgtcctcgatgccaagacccgtgaactgatttccatcgccgtggccattaccacccgctgcgacggttgcatcggcgtgcatgccgatgcggcaatcagggccggcgccacccgcgaagaagtcgctgccacgctggccactgcgatctcgctgaatgccggcgcggcgtacatctactcgctgcgcgcgctggaagcctacgacacgctcaaaccggcgccgcaaagttaagccggaactgttgcggcgtcacgcccagccgacggttgaacacactgcgcatgtgctgggcgtcacgaaatccgcattgataggccacggtcttcagcggtgcggggctgctttcaagcatcacccgcgccgcgtccacccgcgcgcgctcgacaaactccgccggcgtgatgcgcgcctcgcgggcaaacacccgggagaaattgcgcgcactcatgttcgcggccttggccaggtcggcaatggtcaggtccccggtcaggttcgccaacacgtacaactgcaccagcgccaccgccgaggtggtttcggcgtggggcgtcagaaacgggctgaactgcgactgcccgcccgaccgctgggtgaacaccaccaggcgcttggccacgctcaacgcgacttccgggccatggtcctgggccagcagatacaacgacagatcgatgcccgccgtgaccccggccgaggtgtagagattgccatcctgtacgtagaggcgatcggcttcgacctgggccgtggggcacaggcgcgccagatccgccgcatcgttccagtgggtggtgacggttttcccgtccagcagcccggcgcgggccagcatgaaggcgccgttgcagatggagccgaagcgctgcgcacgcgccgtggcaccacgcagccaagcatcgaactcggcgccgaagtcttcgaagggtaactgcggaccacccgccaccagcagcaggtcatagggctcaagggcatcgctgtagtgccggtgggcctgcagcgacagaccgttggaagcggccatgttgccgtgaccgaagccgatgacttccaactggtaatgatcctgcggcggcagaaaacggttggcttcgcagaacacgtccatgggaccggtcacgtccagtgactggacgccggggaagatcaggatggcgacggttttgctcatgagcaggcacaccttctctaactggataaacacagaacccctgtgggagctggcttgcctgcgatgcagacgcctcgatcattcaggtataccgagtcgatgctatcgcaggcaagccagctcccacatttgaccgaatacacctttggcacgatgtacaaccacattggccgggattgctccctcgccgcaatggccccttcgctggcacaagaccagactggaatctttccagaggagaacgaccatgagcaccaccatcgccggcatccagatcccggacagcgccctggccaaggccaccaccgaatacatccgcgacgtcgaatccgacctgctctaccaccactcgcgccgagtgttcctgttcggcgccttgagcggtgaacgcaagcaactggcctacaacccggagctgctttacgtcggcgcgatgttccatgacttgggcctggtggagggccatcgcagtgacaacgagcgcttcgaagtcgacggcgccaacgccgcagccgcgttcctcaagccgtacgggctgagcgatgacgatatcgaacaggtgtggctgtccatcgccctgcacaccacgccgggcgtgccgcagcatttgcgcccgaccgtggcactggtgacggccggtgtggaaatggacgtgctgggcatggactatgccgcgttttccagcgtgcagcgcgaagccgtggtgcatgcgcatccacgcggtgaagggttcaaggagtgcatcatctgcgcgtttgccgacggcttgcgccatcgtccgcagaccacgtttggcaacgtgaagacggatgtgctggtggatcaggagccggggttcaagccgatgaattttgttgaagtgatccgcaagtcgccgtgggtcgcatagttgacttgaaatgcaatcaaatgtgggagggggcttgcccccgatagcggagcatcagccacatatccattggctgacacactgtcatcgggggcaagccccctcccacatttagaccggtgcagccgcccggcgcttgtccggctgctgccagccatccgccgcggcttcttcgatggcttgctgaatggccttcttgcgcatctcttcggcacgccggctgaagaaccacaccaggaaggtcaccagcgacaccgccagcaggatcaggctggccacggcgttgatctcgggtttgaccccaaggcgcaccgccgagaacacttccatcggcagggtcgtcgaacccggccccgacacgaagctggccagtaccaggtcatccagggacagcgcgaacgacatcatgccgcccgccgccaacgacggcgcgatcatcgggatggtgatcaggaagaacaccttccacggtcgcgcacccaggtccattgccgcttcttcgatcgacaggtccaattcacgcaagcgcgccgacaccaccaccgccacatacgccgcacagaacgtggtgtgggcgatccagatggtgacgatgccacgttcctggggccagccgatcatctgcgccatggccacgaacagcagcaacagcgacagaccggtgatcacttccggcatcaccaatggcgcggtcaccaggccgccgaacagcgtgcggcctttgaactggctgatgcgcgtcagcacgaaggccgccaacgtacccagcgccaccgccgccaccgccgtgtagcaggcgatttccagggaacgtgccaccgagcccatcaactgagtgttgtccaaaaggcccacgtaccacttgatcgaccaaccgccccacactgtcaccagtttggattcgttgaacgagtagatcaccaggatcagcatcggcaggtagataaacaacaaccccgccaccagcatgaaactcgagaaactgaagcgcttcatatcttgccctccatctctttggcttggctgcggttgaacaggatgatgggcacgatcaggatcgccagcatcaccaccgccagggcagaggccaccggccagtcacggttgttgaagaactcttgccacaacactttaccgatcatcagggtttccgggccgccgagcagttccgggatcacgaactcgcccaccactgggatgaacaccagcatgcagccggcgatgatgccgttcttggacagcggcacggtgatcttccagaagctgttgaaggtgctcgaacccaggtcggatgcggcttccagcaggctctggtcgtgtttcaccaggttggcgtacaacggcaggatcatgaacggcaggtacgaatagaccacgccgatatacaccgcaatgttggtattgaggatctgcagcggctcgttgatcaagccgatggacatcaggaagccattgagcaggccgttgttgctgaggatgcccatccacgcatacacgcggatcaggatcgcggtccaggtcggcatcatgatcagcagcaccagcacggtctgcatctctttgcgcgcgctggcaatggcgtaggccatcgggtagccgatcaacaggcacagcaacgtgctgaagaacgccattttcagcgagcccaggtacgcagcgatgtacaactcgtcgtcgccgagcatcgcgtagttgcccaggttgagcaccaattgcagtttctgctcaacgaaggtgtagatctcggtgtacggcgggatcgccacgtcggcttcggcaaagctgatcttcaggacgatgaagaacggcagcatgaagaacaggaacagccacaggaagggaatgccaatgaccgcatgacggccactgggcgttattcgttgcaggcggcgcttgagcttcttcatgttcatgagcgcagtaccacgccgctgtcgtcttcccaccacacgtacacctggtcaccccaggtcggccgctggccgcgacgttcggcgttggccacgaaggactgcaccagcttgccgctcggcagctccacgtagaacaccgagtggccgcccaggtaggcaatgtcgtgcaccttgccgctggaccagttgtgctcgcaggtcggcatttcggtggtgaccagcagtttttccgggcggatcgcgtaggtcaccgacttgtcttccaccgaggtggcgatgccgtagcccacatagatgtcgcggtccaggtcggcgcacttgagcaccgcgtggccttcggcatcgtctaccacctgggtatcgaagatgttgacgttgccgatgaactcgcacaccaggcggctggtgggcgtctcgtagatgtcgatcgggctgccgatctgggcgatccagcccaggtgcatgatcgcgatgcgttcggccatggtcatggcctcttcctggtcgtgggtcaccattacgcaggtcacacccacgcgctcgatgatctccaccaactccagttgcatctgcgaacgcagcttcttgtcgagggcgcccatgggctcatcgagcagcagcagtttcggacgcttggccagggaacgggccagggccacacgctgacgctggccgccggacaactggtgcggcttgcgcttggcgtactggctcatttgcaccagcttgagcatctcggccacacgggcgtcgatctcggccttggggatcttgtcctgttgcaggccgaacgcgatgttctgcgccacggtcatgtgtgggaacaaggcgtaggactggaacatcatgttgatcggccgctcgtagggcggcatgtcggtgatgtcttcgccatcgaggtagatgcgaccctcggtcgggcgctcgaaacctgcgagcatgcgcagcaaggtggacttgcccgaacccgaaccgccgagcagggcgaagatctcgcccttcttgatttccagggacacatcgtccacggcaatcgtctcgtcgaacttcttcgtgacccggtcgattttgaccagcaccttcttcggtgtctggtccccttcgagggctttcttataggcgccggaggcaactgccatttacgaaactcccagaaaaaaaagagtgcagcggacccaatgcgggcctgccttggatagtttgagccttacttgcccgtcttgaccttggtccagctacgggtcatcaagcgttgcactttcgggggtagctcgaagttgacgaaggtcctgtcgagtaccgcctgcggtgggtaaaccgcttcgtccgtgcgtatcgattgcttcatcagtttgtccgcccctgggttagggttggcgtaaccgacgtaatcactgacctgggcgatcacctcaggttgcagcaaatagttgatgaaggcgtgggcctctttgacgttggtggcatccttggggatggccagcacgtcgaaccacaggttgccgccttccttcggaatcgcgtaggcgatgttcacgcccttgcccgcttcgcttgcgcgagccttggcctggaacacatcgccggagaacccggcggccacacagatgttgccgttggccaggtccgatatgtacttggaagaatggaagtaggtcacgtagggccgcactttgagcagcttggcttcggccttcttgtagtcttccgggttctcgctgttggggttcaggcccatgtagttgagcactgccggcagcatttcatccgccgagtccatgaacgacacgccgcaggtcgccagcttcttcatgttctcaggctcgaacagcacggcccaggagtcgatatggtcgatgcccagcacttccttcactttatcgacgttgtagccaatgccgttggtgccccacaggtacggcacggcgtactggttgcccgggtcgttcttttccaggcgcttgagcagcgccgggtcgaggttggcgtaattcgtcagcagtgacttgtcgagtttctggaatgccccggccttgatctgcttgcccaggaagtggttggacggcaccaccacgtcgtagccggtacgcccggccagcagcttgccttccagggtttcgttggagtcaaacacgtcatacacgggcttgatgccgctggccttttcgaagttggccagggtgtcggcgccgatgtaatccgaccagttataaatatgcacagtcggtgcggcctgcacgctcaacgtcagcgtgatacctgcacccaccagcaaggctttgcgaaataaagaaattggcaagtggaggtcctcttaaatagttgggccttaaagttgttgcccggcaacaaaaccggcgcgcaacttaccctcgataaaccgatccggcaaaactttctgtcatttaatttgtgagaggggcagtcaaactgcccctccacaggtttcagggcttatttgcccgatttgatcttggtccagctgcgtgtcatttcacgctgggttgcagccggcaggtcggcaatcgcgtagagcttggcctgcacatccgctggcgggtagatgcccgggtcgctggtgatgtctttgtcgaccagtgcggtggccttctcgttaccgttcgggaagcgcacgctatcggtgatcttggccatgacttccggcttgagcaggtagttcatgaacttgtaggccgcgtcgacgttttcggcatccttagggatggcgaccatgtcgaagaagctgccagcgccttctttcggaatgtcgtaggccaccttgaccttgccaccggcttcagccgcacgggacttggcctgctggatgtcacccgagtaccccacggccacgcagatgttgccgttggccaggtcggagatgtacttggacgagtggaagtagccgatcgaaggacggatcttcaggaacagcgcttcggcctgcttgaggtcgtctttcttctggctgtcggtcggcaggcccaggtagtgcagcgcgatcggcagcatttcggttggcgaatcgaggaagctcacgccgcagcttttcagcttggcgatgttctcaggcttgagcagcacgtcccacgaatcgatcttgtccacgcccagcgcggccttgaccttctccgggttgtagccgatgccgatcgaaccccacatgtacgggaaggcgtgcttgttgtccgggtcgctgaccgacacggctttaagcagggatttgttcaggttgtcgtagttggacagcttggacttgtccagctcttggtagacaccagccttgatctgcttggcgaggaagttgttcgacggtacgacgatgtcgtaaccggacttgcctgccagcaacttggcttccagggtttcgttgctgtcaaaaacgtcgtacaccaccttgatgcccgactctttttcaaagttggcgatggtgtccggtgcaatgtagtcggaccagttgtacacgtgcagcactttatcgtcggcctgggccgcgcccgccattgcgcccatcagggacaaggcgaggagggtcttgccagcgttcttcaaacctaatgccttcatttggtgatgctccaattttttcttttttgggccacaagctttttatgttgagtagcccagccaaagggcaacaaaacagggcgacagtctggcaagttccgaggccggctttcaaccaaagcctcatttataactgcccaggacgcagcgcccgaaagccgctgcgttctgagcctagcacttagccctgcaatgccgccaaagtcaggtccaggcactggcgagccttggtcaccagctcgtcgatttctgccttgctgatcaccagcggcggcgaaatgatcatggtgtcgcccacggcgcgcatgatcaggccattttcgaagcagaacgtacggcagatcatcccgacgcccttgccttcgtagcgtttgcgggtggccttgtcctgcaccagttcaatggcaccgagcatgcccacgccgcgcacttcgcccaccagcggatgctccgccaattccctcagacgtttctgcaaatacggtgccgtttcgtcgtgcacacgcttaacaatttgctcatcgcgcatgatgcggatgttttccagggccactgcagcggccaccgggtgaccggagtaggtgaagccgtggttgaaatcaccgccttcgttgaggaccgccaccacgtcatcgcgcacgatcaggccacccatggggatgtaacccgaggtcaggcccttggcgatggtcatcatgtgcggcttgaggtcgtagaaatcgctaccgaaccactcaccggtacggccgaaaccgcagatcacctcatcggcaataaacaggatgtcgtacttggcgaggatttccttgatgcgcggccagtaggtgtctggcggcacgatcacgccaccggcaccctggatcggctccgcaataaacgcacctacgttgtccacgcccagctccaggatcttttcttccagctggttggcggcccacacgccgaattcttccgggctcatgtcgccgccttcgccaaaccagtacggctgggcgatgtgggtgatgcccgggatcggcaagtcgccctgttcatgcatataggtcatgccgcccaggctggcgccggccaccgtggagccgtggtagccattcttgcggctgatgatggttttcttgttcggctggcccttgatcgcccagtagtggcggaccatgcgcaacatggtgtcgttgccttcggaaccggaaccggtgaagaacacgtggttcatgccggcaggtgcgatgtcggaaatggccttggccagttccagcaccggcgggtgtgcggtctggaagaacaggttgtagtacggcagttctttcatttgcttggcggcggcgtcagccagttcatcgcgaccataaccgatcgccacgcaccacaggccggccataccgtcgaggatcttgttgccttcgctgtcccacagataaacgccgtgggctttggtgatgatgcgcgggcctttctctttcaattgcttgaagtcgctgaacggcgccaggtggtgatcactgctcaaggcttgccattcacgggtttgcgggttgttgctggacataccaatctcctagacttttcaggtgagggcgcgctgttcccacagcgcgcccggcgcatcagacggcaaagagcaggaattcccgctcccacgaactgatcacgcgcttgaagttttcatgctcggcccgcttgaccgcgacgtagcctgtgatgaatttctgacccaggtatttctcgatggtcttgctgttttccatgcgctccagggcgtcttcgatggtcaacggcaggcgcaggttgcgccgctcgtaaccacggcccaccaccggcgcgctcggattatggccttcgaccatgccgatgtagccgcacaacaggctggcggcaatcgccaggtacgggttggcgtcggcgcccggcaggcggttttccacacggcggttctgcgggccggcatccggtacgcgcaggccgacggtgcggttttcttcgccccattccacgttcaccggcgccgaggtgtcgggcaggaagcggcggaatgagttcacgttgggagcaaacagtggcagcagttcagggatgaacttctgcaggccgccaatgtggttgaggaacagctggctcatggtcccgtcttcattggagaagacgttcttgccggtggcgatgtcgatgatgctctgatgcaggtgcatcgcgctgccgggctcgccggtcatcggcttggccatgaaggtggcggccacgtcgtgcttgagcgcggcttcgcgcatggtgcgcttgaacaccaggatctggtcggccagggacagggcatcgccgtgacggaagttgatttccatctgggccgtgccgtcttcgtggatcagggtgtcgaggtccagctcctgcagttcgcaccagtcgtaaacgtcttcgaacagcgggtcgaattcgttggcggcttctatagagaaggactggcgaccggtttccgggcggccggaacggccaatcggcggttgcagcgggaagtccgggtcttcgcagcgtttggtcaggtagaactccatctccggcgccacgatgggctgccagcctttgtcagcgtagagcttgaggactttcttgagcacgttgcgcggcgacagctcgatggggttgccttgcttgtcgtaggtgtcgtgaatcacctgggcggtcggctcgatggcccatggcaccaggaacacggcgttctggtcggggcggcagatcatgtcgatgtcggccgggtcgagcaattcataatagatgtcgtcttcgacatagtcgccggtcacggtctgcagcagaacgctttcgggcaggcgcatgcccttttcggcaatgaacttgttggtcggcgagatcttgccccgggtgataccggtgaggtcgccaatcatgcattcgacttctgtgatcttgtggtctttcaaccaatcggtgagctggtcgaggttgttactcataaatgcctctgggctgggtttcctggcatccattaaaggccaggcgttgtttgacgcagcatccgcgtcgttttttcgttcagggtaggagcttacctgccatttgctgctgcgttgcattcctcacgccaaagttgtgcgcaatcttgagcagcatgctgggcgcacgctgttcggtggcagatgaagaggcaaagaagaggtcggcccgggcgtcaagaatattggccggggagcgcgctatcacgcgggaggaatgtacggatgacacagccttgctgaagcaggccaagacgccgttgggcggcaggtgaaacatgaagcaccccggtattattgctgttatgggtttgaatcgagcttagccttgttcatttttttacacaacacccccgtaaaaaatacaacacggcccgctcaagcctgcgagtcctaagccgttcaaacccaaaaaaccgccccaaaaggccccaaaaaagccttcgtggcgcttttttagggcaaaaaaggcctcgcttgacttcggcatgccgttcgggttgactgaaaccagaaaagatcaatgattgatatttttaacaacaaaggtgttgcatcatgtcggtacccccgcgtgccgttcagcttaacgaagcgaacgcgttccttaaggatcatcctgaggttctgtacgtagaccttctaattgcggatatgaatggtgtggtgcgcggcaagcgcatcgaacgcaccagcctccacaaggtttacgagaagggcattaacctgcctgcctctttatttgccctggatatcaacggctctacggtggaaagcaccggcctgggcctggacatcggtgatgctgaccgaatctgttatccgatccccgacaccctgtgcaatgaaccctggcaaaagcgccctaccgcgcaattgctgatgaccatgcacgaacttgaaggtgaacctttcttcgccgatccgcgcgaagtgctccgccaagttgtaagcaaatttgacgacctcggtctgaccatctgcgccgccttcgagcttgagttctacctgatcgaccaggagaacgtgaacggccgcccacaaccgccccgctcgccgatctccggcaaacgcccgcactcgacacaggtctacctgatcgacgacctcgacgaatacgtcgactgcctccaggacatcctggaaggtgcgaaagagcaaggcatcccggccgacgccatcgtcaaggaaagtgccccggcgcagttcgaagtgaacctgcaccacgtggccgacccgatcaaggcctgcgactacgcggtactgctcaagcgcctgatcaagaacatcgcctacgaccatgagatggacaccaccttcatggccaagccttacccaggccaggcaggcaacggtttgcacgtacacatctcgatcctggacaaagacggcaagaacatttttgccagcgaggatcccgagcagaacgccgcattgcgtcacgcgatcggcggtgtgctcgagaccctgcccgcccagatggcgttcctgtgccccaacgtcaactcctaccgtcgtttcggcgcacagttctacgtgccgaactcgccgtgctggggcctggacaaccgcaccgtggcgattcgcgtaccgaccggctcgtccgatgccgtacgtatcgaacaccgcgtggccggcgccgacgccaacccttatctgctgatggcttcggtcctggcaggcgtgcaccacggcctgaccaacaagatcgagcctggcgcaccggtggaaggcaacagctacgagcagaacgaacagagcctgccgaacaacctgcgcgatgcactgcgtgagttggacgacagcgaggtgatggccaagtacatcgatcctaaatacatcgatatcttcgtcgcctgtaaggaaagtgagctggaagagttcgaacactccatctccgaccttgagtacaactggtacttgcataccgtctaaacgacggctgcatcaaatgtggtgagcgggcttgttgtggcgagcaggcttgccctgcgttgggctgcgaagcagccctgaatccagacgccgagttctttcagaaggaactcggtgttttttattggggccgctgcgcggcccaacgcggggcaagcccgctcgccacacatacacagtcgcctcacaggtatggatcatccttatgctctgcgtacaatgcgctcagccttgtaggagacttccatgaccacccgccccgcgccccttcgcaaaccccgcgcccgcagccaggcccggatcgatgcgatcctcgacgccgcccgcaccttgctggctgccgaaggcgtggcgggtttgtcgatctacggcgtggccgagcgggcgcagattccgccgtcgtcggtgtatcacttcttcgccagtgtgccggcgctgttggaagccttgaccgccgatgtgcacgccgctttccgggcggcgattcaggcgcccatcgagcatgactcactcaagcactggcgcgacctgtcctgcatcgttgaacagcgcatgctcagcatctacgagcacgacgccgccgcgcgtcagctgatcctggcgcagcatgggctgactgaagtaacccaggcggatcgtcagcatgatctggagctgggcgacctgatgctcaccgtgttcaaccgtcactttgaagtgccgacgctaccgaaggatgtggatgtatttgccctggcgctggagctgagcgaccgcgtgtatgcgcgctcggtgcatcagcatgggctgatcacgccgcgtatggcgcaggaggggatgcgggtgtttgatgcctatgtggggctgtacctgccgccctacctgcccaagcgttaattttgtgggggccgggccggcctcatcgggggcaagccccctcccacattttgaatgtattcacaaatcaaagtgtgggagggggcttgcccccgatggcggtctcaagcgccatcacaacttggcgatcgacacctcggtggacttcacgaaggcaatcacttcgctgccaatcaccagttccagctccttgaccgagcgggtggtgatcacggaggtgacaataccggacgcggtctgcacgtcgatttccgacagcacgtcgccttcgacgatttccttgatggtgcctttgaattggttacgcacgttgatggctttaatagtcatggtgttcttccttcaggggacgagtgagttattgagcccaacgcaattgcgtaggcagcggtgaaacaggttcgggttccggtggcgagcccggcagggacaacacacggttgagcacttcagcctccaacgcggccaggcgatgcgagccccgggcacgcgggcgtggcaggtcgacgatcaggtcaagaccgatctcgccgtcttcgatcaggatcacccgatcggcaatcgccacggcttcactgacgtcatgggtcaccagcaacacggtgaagccgtgcttctgccagaggttttcgatcagttgctgcatctcgatgcgggtcagggcatccagcgcgcccaacggttcgtccagcaacagcaggcgcggttggtggatcaacgcgcgggccagggccacgcgttgcttttgcccaccggacagcgccgccggccactcgttggcacgttcggcgaggccaaccgcttccagggcctccaacgctttgggccgccagtcacccttgaggcccaggcccacgttgtcgatgatctttttccacggcagcaggcgcgcttcctggaacatcaaccgcgtgtcttcaatcgcttcgctcagtggtgcggagccggccagcagctcgccgccgctggctttgtccagcccggccagcaggcgcaacaaggtacttttaccgcagccactgcgaccgaccaccgccacgaattggccggctggaatgtgcaggtcgatgtccttgagcacttcgcgcgcgccaaaggccttgcgcaacttgcgtactgccagggggatacccttgagcaggcgcggaggttgttgagctgtcatgccgcacctcctttattcacttgatacgccgggtgccagcgcagccacacacgctccaggccacgagcggccaggtcggcgagtttgccgaggatggcgtacatgacgatggccaataccaccacgtcggtttgcaggaattcccgggcgttcatcgccaggtagccgatgcccgagctggccgagatggtttccgccacgatcagcgtcagccacatgaagcccagggcaaagcgcacgcccaccaggatcgacggcagcgcgcccggcaggatcacctggcgaaacaggctgaacccggacaagccgtagctgcgcgacatctccaccaacgccgggtcgacgttgcggatgccgtggtaggtattcaggtagatcgggaacagcgtgccgagggcgaccaggaaaatcttcgccgtctcatcaatgccgaaccacaggatcaccagcggaatcagcgccaggtgcggcacgttacggatcatctgcaccgaactgtccagcaggcgttcgccccacttcgacagaccagtgataaagcccaggaccaggccgatgctgccgccgatcacaaaccccaggccggcacgccagccactgatcgccaggtgcgtccagatttcaccgctggcaaccagatgcacaccggccgcaatcacggcactaggcgccggcaggatacgggtcgacaaccagcccgccgacaccgacaactgccacaccgcgagcaatagcaccggcagaatccagggcgccacacggtggcttagtttttcatagctcatggtgcggcctcagctctgcgacgcagctttgggaaggatgtcgttggccaccatctcgccgaacgggctgacgtagccggcgcttttcggcagctcgggacgttcgatatccaggtgcggaaacagcaactcggcgacgcgatacgactcttccaggtgtggataaccggagaagatgaatgtatcgatacccagcgccgcgtattccttgacgcgctccgccacggtcgggccatcgccgaccagcgcggtgcccgcaccaccacgcaccaggccgacaccggcccacaggttggggctgacttcgaggttgtcgcggttgccaccgtgcaacgccgccatgcgttgctggccgacggaatcaaagcgtgccagggaggcctgggcacgggcgatggtctcgtcgtccaggtgggagatcagtttgtcggcggccttccatgcttcttcgttggtttcacgcacgatcacatgcaggcggataccaaagcgcacggtacgcccgagcttggcggccttggcccgtacctgttcgattttttccgcgacagcggccggtggctcgccccaagtcagcaccatttccacctgctcggctgccaggtcctgggccgcttcggaggaaccgccgaagtacagtggcggacgcggttgctggattggcggataaagcagcttggcgcctttgacgctgatgtgcgcgccgtcgtaatccacggtctcgccctccagcacacgccgccagatgcgggtgaattccaccgaggcttgataacgctcttcatggctgagaaacaagccatcgccggccaactcttccggatcaccgccggtgaccaggttgaacaacgcacgcccgccagacaggcggtccagggtcgcggcctgacgcgcggccaccgtcggggaaatgatcccggggcgcagcgcgacaaggaatttcaaacgctgggtcaccgggatcagcgaagcggccaccagccacgagtcttcgcaggagcgcccggtcgggatcagcaccccgccgaagcccaggcggtcggcggcctgggccacttgctgcaaataaccgtggtcaacggcgcgagcgccttcggcggtgccaaggtagtggccgtcgccgtgggtaggcaggaaccagaaaatattgaggctcatggagttgtctcctgaagaagtcggattacggcgctttggcaacggcggcgggtggcgtccagatcacgtccttgatgctcaagggtttggggatcaatttgagttggtagaagctgtcggcgattttctgttgggcggcgaccacttccggggtcaggaacaatgcgccatagccttggcgcttcaccgaggtcagggtgatgtcagccggcagaccgagcagcggtgcgacttgttcggtgacttcctggggattggccttggaccattcgcccacggcgcgcacttcttccaccagcgccttgatcacttctggatgttgttcggcgtagggcttggtcgccaggtagaactgatggttgtcggcgataccggtaccatcacgcagggtgcgggcttgcagctgtttctcggcggcggcctggtacgggtcccagatcacccaggcgtccacgctgccacgctcgaaagcggcacgggcatcggcgggcggcaggaacacggtctgcacgtcggtgtatttcaggccggcgtcttccagggcacgtaccaacaggtagtgcacgttggagcctttgttgagcacgatttttttgcccttgagctcggccacggatttgatcggtgagtctttcggcaccaggatcgcttcactggtcggcgccggtggttcgtaggctacgtagagcaggtcggcgccggcggcctgggcgaacaccggcggggtttcgccggtcacgccgaagtcgatggagccgacattcaggccttcaagcaactgggggccgccagggaactcggtccattgcacgttgacgccttgggccgccaggcgtttttccagggtgcccttggccttgagcagcaccagcgtgccgtatttctgatagccgatccgcagggtctcggccgcttgagcttgaacaatggcgccgaaggacacagccgcagcaaacagtgcgaccagaccacgacgcaagatgacagtgcgcatggcgctctctccaaaaatgcgattaggggttttggctgcacctgcttggccgttggcggctgagtaaggtgagtgtttcttttatatcggtgaggctcagatgctccagcgagcactcaacagacgttcattcaacacgtgggggtccagcggtttcgggcgacgggccatggcgccgtaaagtgtttccagggcttcgtgcaaacgctgttcaagtaccggcaccaattgcgcctgggcactgccttcgccgtacgcgatctggctgtcttcggcaaagatgccgtggagcaactcctgggctttcaacgccgacagcaccggcttcaatgcgtagtccaccgccagcatgtgggcgatgctgccgccggtggccatcggcaacacgatcttgtgggccagggcgcgttcaggcagcaggtccagcacggtcttcagcgcgccggagaacgaggccttgtacaccggcgtggcgatcaccaggccatcggcgttggcgacttgctgcagcaggtcgatgaccttggggctgtcgaagcgcgcatgcagcaggtcctcagccgggaagtcccgtatctggtaactcaccacttctacgcctttgtcttgcaaccactgacgggttttatccagcaacaccccggagcgcgaacgctggctgggactgcctccaagtgttacgaccaacatgcaggaattccttgagcaggtgtcggcggttcgctgtgtggcgatggcgccaagatggaacagaccttatcagcagattcatatatctataaatcttattttttcatttgtttattctctaaatgcatatgagagttatagatctccaggcgaaaaaaaaggccgtcgaaacggcctgaaaacccctgctatgtgattcggtttacatctcaattctgtggtacatgcaccgccgccatcgcgggcaagcccggctcccacagnnnnnnnnnnnnnnctgtgggagccgggcttgcccgcgatggcgatttcagcatcaacgattgggctgcggggtgaggcgcaggtacggcttcaccgcgcgataacccttcggaaagcgtttcttgatctcttcctcgtccttgagcgacggcacgatcaccacttcatcgccgtcctgccagttggcgggcgtggcgaccttgtggttgtcggtgagctgcaacgagtcgatgacccgcaggatttcgtggaaattacgcccggtactggccgggtaggtgatggtcaggcggatcttcttgttcgggtcgatcacgaacaaggaacgcacggtgagggtgtcactggcgttggggtggatcaggtcgtacaggtcggacactttgcgatcggcgtcggccaggatcgggaagttgacgaccgtgttctgggtttcgttgatgtcttcgatccacttgtggtgcgagtccaccgggtcgaccgacagggcgatggccttgacgccacgctgggcgaattcgtccttgagcttggcggtaaaacccagttcggtggtgcacaccggagtgaaatccgccgggtgggaaaacagcacaccccagctatcgcccagccattcgtggaaacgaatcgtgccagcgctggaatcctgttcgaagtcgggggcgatatcgccaagtcttaggctcatggtgtggctcctgatgagtgcttatggagccaactgtgcatggattgcggattatttaaaaagaataaatatcgatttatctagacgataaaggaatattaaaaatctgttcattggacgtgggtgcaggcgaggagcaacatcgttttcaaggttcgagaaggccttgagacgctgcacaaagaggggttcaggaagggcctgcgggggtttggcccgacttgaaagcaagacaccctgcccggtgttgcaccgggcagggctttacaggcttacaacagcgtcacgctactagaacagtggcagcgagtagctgacgatcagacggttttcgtcctgggaacgggtgttcgccaggtcggtacgccacatagcgtttttccaggcaacgccgaggtttttcagcggaccttctggaatcacgtaggcaacggtgatgtcgcgttcccactcggattgaccggtggtttcggcacggccgttgttgttggcgatggtgtcgatgtcgctacctttgaggtaaacaacaccagcggtcaggccaggtacaccgacttttgcgaagtcataggcgtagcgagcttgccaggtacgctcgccagcgcgggcgaacttctggatctgcatgtcggtagtgatgtaagccgacgagccgtcaccctggttcaaccaagggaagtcgctgctgccattgctgacctggtaaccaccaccgaaggtgtgaccggcaacggtgtacaggaacaggccgctgtacaggttgttgtcgaccttgcctttaccggcgttgaagttgttgtagttaccgctggagtagtaagcggcggtgtcgccgttcttgccatcgtccgagctgttgaaataacgcaggtcagacttcagaacgcccgggccgattgcccagttgtgggtcagacccaggaagtgctgcttgtagaagtcttccagattgccgtagtagtactgggcagtcaggtctttggtcagcttgtagtcaccaccggcgtagtagaacttgttgctgaacttgccggcgttgtagttggagctaccgttggcgccgccaatcgacaggttttcgttgttgctggagttacggcccttggccttttccacctgaccggccaccaaggtcaaatccttgatgtcgttggtggtgatctggccaccttggaaggtttgcggcagcagacgaccatcgttggtcacgataaccggcagttttggctgcagggtacccagcttcagttcggtctgggagatcttcaccttaccggtcacgcccaggctggcgtaatcgtggacggctttgttgccgtcgcttgggaagatggtgccgccggaagcggtgccggtgtagttaccgtgatcagcacggctcgaatccagacgcacgccgtacaggccgatcgcgtcaacaccgaactgaacggtaccttgggtgtaacccgagatgaaacgcagatcgaagccttggccccattcagcgtttttgctacgtgtgttggacgtggcgttagggtggccgtcacggttatcagtgttgatgtagaagttacgcagccccagtgttgccttactgtcttcgatgaaaccggcggagtttgcctgctgggcaatcgcagccaaagctacggccaacgccaatgttgacttcttcatgtaccgctcctctcatttctaatttttgtatttctttggtctcgggtctgacgccctcgatccacagatgcccgattagcgccagatagtgactaccaagtcaatcgtaaccttgtgtgtctactaccttcgtctaatcgcagttgatttggtccctgcagggtaatgagtttttcatacacccaaaaagaattgtttcattctttttcatacgattcgggaataagccttttcatgacgcggacccgtcagggtagacgacccactccataagctaatgcctaaaaggtatttgttagcgcttttttagatcgtttagtgtggccgtactgttgcatacgtcacccacgatcaaaaaggcgacgccatcatggccaaacgcacatcctcccgtcaatttgttacagtttttgtgtcactaatactttcttttggtgtcaaagccgccgatttgaccatcggcgagaaaattgcctagtgccgtttcaacagtgggccggaagtcgtaaccgccatcgcctcgggcgacttgcgaatcggcaacctcggttccagccctcttgccgcagtggcatagcggaatctatccatcgtcgcgttcatcgtatcggcccagatcaatacttctgaagcatgggtggtgcgtaatgacagccacattgacgcacccagggatttgatcggtaaaaccatcgccacgccgtttgtcattagtggatacggaaccggtgcacaaaatcgcgaaaatgacaggcgccaacgccgcagacactcctgagctgctggcaggcacgacattcccggatgcccaggcacaacaagccgatgcgctgctaaaaggcggcacggcaaagtttttgaaggaaaagggaaaggtggaggtggtgctgccggattacttggccttggtgactgacaaatttatcagtccgagaactgatccatgtgggagcgggcttgctcccacattttttgacctgagtcgttcccgaaatcgaggttacagggccttctcgaaaatcttcgaattacgctgatagttgtacagggacgcccgcgcagacggcagacggtcaacactgctcggctcaaacccccgctcacggaaccagtgggcggtgcgggtggtgaggacaaacaaggtcttcaacccctgcgcccgggcacgggcctggatgcgctccagcaacacatcaccacgtgcgccatgacggtactccgggttcactgccaggcaagccaactcacccgcgtccgaatcggcaatctgatacagcgccgcacaggcgatgatcatgccttcgcgctccaccacgctgaactgctcgatctcacgctccagcacttcccgcgaacggcgtaccaggatgccctgctcttccagcgggctgatcaggtcaagcaaaccgccgacatcctcaatcgccgcttcgcgcacctgctcgaattgctcctgggccaccagcgtaccgccgccgtcccgggtaaacagctcggtgagcaaggcgccgtcttcggcatagctgacaatatggctgcgccctactccaccccggcacgcttcggcggcggcatcgagcaattcggcctgatagttggttttgcccaggcgttgcaggtgagccggcacctgttgcgggcgcaactcgcgtaccaggcgaccattttcatcgatcaagcccatatcggcgccaaacaacagcagcttgtcggcgcccaggtcgatggcggcgcgggtggcgacgtcttcgcaggccaggttgaagatctccccggtcggcgagtagcccaacggcgacagcagcacgatggagcgttcgtccaacaggcggttgatgcccttgcggtctacgcggcgtacttcgccggtgtggtggtagtccacgccatccaatacaccgatgggacgtgcggtcacgaaattaccgctggttacacgcaggcgcgagccctgcatcggcgacgaggccatgtccatcgataggcgagcttcaatggcgatgcgcaggtggccgaccgcgtcgatcacgcactccagcgtcgccgcgtcagtgatgcgcatgccttcgtggtaagtcgggatcaggccacgcgcttcaaggcgcacttcgatctgtggccgcgaaccgtggaccagtaccaagcgcacgcccaggctgtgcagcagcaccaggtcgtggacgatattgccgaagttgggatgctccacaccgtcgccgggcagcatgaccacaaaggtacagtcgcggtgggcattgatgtagggggacgcgtgacgaagccagttaacgtagtcgggcatagaacctgggcctgtaataaaaagcagccgaaaaaggatgaatcatgaaagcgcacggcgggctgatggttatcgtcggaacaggcttggcgacacgctcactctccttctatgtacgaacaggcaggggttaatttatgcaggtttcaggcagtaatgttcgatcagttcccgcaatagacgcactgtaggcgtcaagcgtgacatttcgaggtattcgcccggctggtgcgcgcaggcgatgtcgccggggccgagcaccagggtttcacaaccaaggcgctgaagataaggcgcttcggtgccgaacgctactgcttcggcacgatggccggtcaatcgttccgccacccgcaccagttcggcgtcttccggttgctcgaagggcggtacctcggggaacagcggcgcgtagtcaatcttgacctgatggcgctcggccaacggctggagcttctggcggatcgcatcacgcagcacctgagggtccatgcccggcagtgggcgcaggtcgaactccagggaacactggccgcagatgcggttggggttgtcgccgccgtggatacagccgaagttcatggtcggctgcggcacgctgaattgcgggttgcggtactcgcgctgccaggctaggcgcaggccgcgcagttcgccgatggcgtcgtgcatggcttcaagcgcgctgtggcccaggctcgggtccgacgaatggccgctttggccaagaatatcgatgcgctccatcatcacgcctttatgcaggcggatcggtttgaggccagtcggctcgccgatcaccgctgcgcggcccaatggacggcccgcctcggccagtgcacgggcgccggacatggagctttcctcgtcgcacgtggcgagaatcagcagcggctgtttgaatggctgatccagcagcggcaacactgcttcaatggccagcgcgaaaaagcccttcatgtcgcagctgcccaagcctacccaacggccgtcgacttccgtcagcttgagcgggtcggtcttccacagcgctgcgtcataagggacggtatcactatgacccgccagcaccaggccaccgggcccactgccgtaactggccaacaggttgaacttgccggggctgacctgttggatatcgatggcgaaacccagatcccccagccaagcggcgagcaagtcgatcaccgggcggttggtctggtcgagagacgcctgggtgcagctcacggatggcgcagcaatcagcgcggcaaactgctctttcatggacggtaacggcatgctcggcctctcgacttcccggatgaacctcactatagagccatctgcacgacacaataaaccgttgcggcacgttgccgggctcagtcctgtacactgcacgaccttggcagccactcttttacccggctgcgctcccgatcctggatgttccggccatgcaaaaagaaactgaaatcaagctccgcgtcagccgcgagaccctcgccgcgctgcgtgagcacccgctcctgaaaaaacgcaacaaaagtggctgggaacgccgtgagttgatgaaccagtacttcgacactcccgagcgcgacctggcccaggccaaagtcgccctgcgcctgcgcaaggacggtgacgacatcattcagaccctcaagacccgtggccagagcgtcgccggcttgtcggaacgtaacgaatacaactgggaactgcccaaagccaagctcgacgtaaagaaactcgacggcgaatgctggcccgagcaactggccgagctggacaaaaagaccctcaagccgatcttcaccaccgacttcgtgcgtgagcgcgccgaaatcgcctgggggcgcggcaaggccaaggtggtgatcgaagccgccctggacctgggccacgtggtggtcggcaagcagaaagaagaaatctgcgagctggaactggaactgcgcgaaggcgaaccgtctgccctgctggaactggccgccgaactggccgcgaccctggcgttgatgccgtgcgatatcagcaaggccgagcgcggctaccgcctgtacgacgccagcagctactccctgagccttccggcgccacagttgcacgccgaaatgccgctggatgacgccttcgccgcaatcatgtggcacctgctgggcagcagccaacgcctggccgagcaataccgtttcaatggccactggcgcctgctgcaagactgggtcgacaacctcggcgaactgcgtgccctggtcggcagcctcggccaggcggcaccgcgtcagtccaccagcgagctgcgcagcgcactcgatgccctgctggaagactggcgtccactggtacaggccggtgatgacgacgaagacatccgcaaagccgcgccggagcagttcgccgaagaactggacgacgtgcgctggggcctgttctcgctgaacgcttcacgctggctgctggcccgcacctggaccgcggaccgcaacgtgcgtggcaaccgccaaggcgccgcgcaaatcaccaactggctgccgcgcctgctggccgacgatgccgtcgccctgcaactgccgcgctaccagcaacagccggaagacctggccgagcaattgccacgcatcgagcgtatccaggcctggctgcaccatgcgcgtcaggtggtcgacattcccgaactggaccgtctgtacggcgagctgaacaagttggtgcaactggccaaccagccgatcaccgatgagtcgctggatgcgcggatgcatcaggcgattgcggtgtatcagaaccgggcgtggaagaccttgttgcgcctgtaaggccgctttcgcgggcaagcccgctcccacactgactgggttcacacatagaaatctgtgaacccaatccaatgtgggagccgggcttgcccgcgatgaggccatccctgtcagcgcaatactggcaggctggtggtggatttgatctcggacaaagccacaatcgaattgacctcctgaatccccggcaccatcgacagcttctcgaagaaaaaccgctcatacgcctcgatgtccgaggtgacgatgcgcagtagaaaatccaccgcccccatcagcacataacactccagcacttccggaaacccgcgaatcgcgtcggtgaactcggtgaagttggaacgaccgtgggcgttgagtttcacttcggcgaatatctgcgtgttgaggccgatcttcttgcgatccagcaaggtcacctggccgcgaatcacgccctcttccttgagccgttggatgcgtcgccagcaaggcgactgggaaaggcccacctgttcggcgatctgcgcgctggagagagaagcgtcttcttgcaacagggccaggatacggcggtcataggcgtccaactcgctgtgcatataaataccctccatcgcacttattctgaattgattgattcgattttttacaaaacaggcccatcttagataagaaatctccggtggcgaatgtaaaaatttctccagtcgaatctggagctttcccatgcacgccgtcgaaaccaaccaccccgctacccgcgtcgatgcgtgggccgtcaacaacgcccattgccaggcgcattaccagatcgtcgccgaggcggagcccgacgtggtgtgccgggtacttaactacttcgccctgcaatgcctcacgccgcaacaggtcacggtcaaccgcgaagaagacctgttgaacatcggcatcgtcatggacggcctgagctggcaccgcgcccaggtgatcggtgaaaagattcgaaacctgatcagcgtgtgcgcgctggacgtgtggtcggctgatgccgcggggcctctggcagtggtggcggtcgctcagtaagaacctgcaatacacgccgggaggaagatatccaggggctggctagcctgggatttacgcccactgccctcaggaaaaccttcatgccggttgatcaacgcttggaactgcatcaactgctgccggctttgcttgaagggcgactgatcaccccagaagttgcacagcagttgtcggcgctgccggccagcaacaccttgcatcccctggaacgcatcgcagcccttggccccagcctggaaaccctgtccgaatggctggcccagcatgccgggcaaccgtacctgcgtatcgacccgttgaagatcgatgtggcgacggtcgtgccgctcatgtcccacgcgttcgcccaacgccactcgatccttgcggtggcggtggacgcgcagacggtcaccgtcgccagcgcccagccacacgtcaccagttgggaagccgggctggcgcaggtgctcaagcgctcgatcaagcgtgtggtcgccaacccccaggacataacgcgctgtatcggcgagttctaccggctggcgaagtccgtcagcggcgccgatcaaaaagttgcggcaccgggcaacaacgaactgctcaacctcggcgccagcgaccaggagccggatgccaacgacgcacatatcgtcaacatcgtcgactggctgttgcaatacgctttcggccagcgcgccagcgatatccacattgagccgtgccgagaacagggccgtgtgcgctttcgtatcgacgggttgttgcacgacgtctatcagttcccgccccaggtcacgatggcagtggtcagccgcctcaaaagcctgggccgcatgaatgtggcggaaaagcgcaggccccaggacggtcgggtcaagaccaaaagcccgaccggagcggaagtggagctgcgcctgtccaccttgcccacggcgtttggcgaaaagctggtgatgcggatcttcgacccacaagtactgctcaagggctttgaccagcttggtttatcggttgaggaccagcaacgctggcaagccatgacgagccagaccaacggcatcatcctggttaccggccctaccggttcaggcaagaccagcaccctctacaccacgctcaagcaattggccacgcgggaggtcaacctgtgcaccgtggaagatccgatcgagatggtcgagccggcgttcaaccagatgcaggtgcagcacaatatcgacctgaccttcgccagcggcatccgcgccctgctccgccaggacccggacatcatcatgatcggcgagatccgcgaccaggagaccgccgaaatggcgatccaggccgcattgaccgggcacatggtgctgtcgaccctgcataccaacgatgcgcccagcgccatcagccgcttgcaggaactgggcattgcgcattatttgatcaaggccaccttgctcggcgtaatggcgcagcgtttggtgcgggtcttatgcccgcactgcaagcggtctctgggtgacgcccatgaagcggtcgggtgcgttgaatgtcgacacagcggttatcaggggcgggccggcgtttacgaaatcatggttttgaacgaagcgctcaacacattgatcacgcctggggccgatgtgcaggccctgcgccaggccgcagttacccacggcatgtgcagcttgcgcatggccggcatgcagaaggtcgcggcgggggtcaccacgatggcggaagtcttgcgggtgactcccggggattcggtaacaaatcctttgtttgtcaggcagtgaaaccgttcttatcggtgacaacaccgttacaatcggcccaacgtcgtttcactgacaccatcagatagggaatcgctatgcagatcggaaccgtactgcttcttttcgtgggtttggccatcgccatcctgttcatgggcttcaaggtggtcccccagggctaccaatggacggtcgagcgttttggccgttacaccaacaccctcaagcctggcttgaacatcatcatcccggtcatggaccgcatcggtcgcaagatcaacgtgatggaaagcgtactggatatcccgccccaggaagtcatcaccgccgacaacgccaccgtgcagatcgacgccgtgtgcttcttccaggtggtaaacaccgcccaggccgcctacgaggtcaacaacctcgaacacgccatccgcaacctgctgcaaaccaacatccgtaccgtgctcggctccatggaactggatgccatgctcagccagcgtgacggcatcaacgaaaaactgctgaagaccgtggacgaagccaccgcgccgtgggggatcaagatcacccgtatcgagatcaaggacatcagcccgcctgccgacctgatggccgccatgtcgggccagatgaaagccgaacggatcaagcgtgcgcagatcctcgaagccgaaggcctgcgcgcctcggcgatcctgactgccgaaggcaagaagcaggcacagattctcgaggccgaaggtagccggcaggcggcgttccttgaatccgaagcccgtgagcgtcaggccgaagccgaagcacgcgccacacaggtggtgtcggaagcgatcgcatcaggcaacgtgcaggcggtcaattacttcgtcgcacagaaatacatcgacgccctgggcaagctggcctcggccaacaacagcaaggtcatcctgatgccgctggaggccagccaggtgatcggcgcagttggcggtatcggcgagatcgtcaaggcaacgttcgacaacaagaaaggctgaggccagcgccatgtgggatttcctgcagcatctgtcgttctgggattggttggcactgggcacagtactgctgattcttgaggtattcggcgctggcggttacctgttgtggatgggtatcgccgcagccgccgtgggcgtgatcaagtttctggtgccacccctggggctggaatggcaacttctgctgtttgccgtgttgtcgataatgacggcggtgtactggtggaagcgtcagcgcagcagcgccaaggccagcgaccagccgggtctcaacgagcgcggttccgagctgatcggccgcaccttcgtggtgcaccaggcgattgtggatggccggggcaaggtaaaagtcggtgatggcgtatggatggtgaccggcccggacagccccgtaggcgctcaagtgcgggtggttggccaggaaggcgtggtgttaagggttgaaactgtttagtcagtgatggaactcggttgggctaactacaatcataaagtacagataacccacccggagtcacccatcatgcgtctcaaatatgctgtcgcaacccttgctgtgctttccctccctgtcggatcagccatggccgacagtttctggcgcaatgtcatctcgtcgggcgccaccaccggctcgacgtacctgacgttcaaggaccacaagctggtggtcgccgcccaagacgacgccggcagcttcgttgccagcgatggcggcatccgtggcccatacctggaagccgcgatgcagaaagtccgcgccgacaaccctggcctgcaggccacggacatggagctggccaacgctatcctcgcgaaaaatgcagtcaccgaataactcgggctcaataaaaatgccgctgttaacagcggcatttttttgtcctcaattcctacggtcatcatcgctgggcactacacgagcattgctgttttcccaactgcatacagagaagtcctgtcgagcctcactctgccgggccacaagctaaggattcctttttgaacaaagcgaatcactgcccatgcacaagattgcctacgcactgctgttctctgcatttgccaccgcctacgcccaggcagaaagctggtacggatcagccaaattcaacagcgctcgccagaacctctccagttcactgctcaccagcccgcgcgtgacggacagggtggacgccccggatagcagcaaagcattcgtggcctctttcgccgcaggctatgccttcgccaatggctggcgcctggaaggggagtacacgatgccaaacagttcgaccttcaaatcctactgggcccccttcaatgccaacgtcaacagcctgcatgtgcagagccagcgcttgatgctcaacggctataaagatatcccgatcaaccagtggctatcgttttacggtatggccggtgtgggcatcgcacgcattgagtccgaaggttatcaaaccattgagacccgtcgttttgccagcaaccgccaacataaccttgcctatagcctgggtattgggctggaggccaaggccagtgagcgactcacgttaggggcgggttatcgttacaccgccatgggcgacgtcgaaaccggttacaacaccttcacgaaccgcgcaaatgcacgggatgagcaactcaaaggcaaactcaaggagcagaacatgttcctggaagcgcggcttgccttctgattatttgcgaagaatgccgccttcgacgtggcattcttcggctcaatagtgacgattcattcacagatgacaggctatattcagtcaagccgtgcaaccatgccggtactgatacctcgcttactcatcgccaacctgaaacggatgccttcgtcgtcatgagccaactgcccttcctgccgttttccaaacccaccatcgatgaagccaccattgcagcggtcggcgatgtactgcgctcgggctggatcaccagcgggccgaaggtgcaggccttcgaagctcagttgtcggagtactttggcggtcggccggtgcgcaccttcaactcgggcacctgcaccatggagattgccttgcgcattgccggcatcgggccaggcgatgaagtcatcaccacgccgatttcctgggtagccacggccaacgtgattctggaagtgggcgctacgccggtgtttgccgatattgacccggtgacccgcaatatcgacctgtcccaggtggaagcggcgattaccccgcgcaccaaggcgatcatcccggtttacctggccggcctgcccctggatatgccgatgctgtatgcactggcgaacaagtacaacctgcgcattatcgaagatgcggcgcaggcgctgggttccagctgggatggcgagcgtattggcgccaccggggattttgtgtcgttcagtttccaggccaacaagaacatcacctcttccgagggcggctgcctggtgttgaacaacgccgaagaagcgcgactggcagaaaaataccgcctgcaaggtgttacccgtaccggcttcgacggcctggacgtggatgtattaggcggcaagttcaacatgaccgacatcgccgccgccattggcctggggcaatttgcccatatcgagcagatcactgctcaccgccagaacctggcgcggcactacttcaaatgctttggcagtgactttgaagagcagtacggcgcacaactgccgccggcagacttcgaaaacagcaactggcacctgtttcaactggtgctgccggaacgtcaggacggcctgccagcccgcgccaccttcatggagcaaatgcaggcccatggcgtcggcattggctatcactacccgccgatccacctgctgagcctttatcgggcacaggggttcaaggaaggcatgttcccggtggcggagaaagtggggcgcttgatcgtgtcgttgccgatgtttacggcgatgacagaggcggatgtggagcggtcggtggcagccgtgaaggcagttctacagccctaaaagcacattgcgggagccgtataaccggctcccgcaacaggatcactcgccgatggcggctttgtagccggcagcatccagcaatttgtccaggtcagccgggttgcttggcttgagcttgaagatccaagcgccgtagggatcagagttcagcagctccgggctgccactcagttcttcgttgacggcaatcacttcgcctgcaaccggggcgtagatatccgaggcggccttgaccgactcaaccacacccgcctggccagcagcgtcaaactgggcgcccacttcggccaactcaacaaacaccacatcacccaacgcttcctgagcatggtcggaaataccgacggtcacggtgccgtcagcttccaggcgtgcccattcgtggctttcggcaaaacgcaggtcggcagggatatcgctcataatctgtgtcctcaagaagtaatgtcagcggccattggcctgccggaaataggttagatcaaggttttgccatggcgcacgaaggtcggtttgaccactcgaaccgggtaccacttgccgcggatttccacttcggcccgatcagcggttgccgtcggtacacgcgccagggcaatggatttgctcagcgtaggagagaaactaccactggtgatctccccttcgccaatattggcgatacgaaccacctggtgagcgcgcaaaaccccgcgttcttccagcaccagcccgaccagcttgaactgcaccccggctgctttttctgcttccagcgcggcgcggccaatgaaattacgctcggcaggctcccaggcgatgctccaggccatgttcgatgccaggggcgaaacctcctggtggatgtcctggccgtacaggttcatccccgcttccaggcgcagggtatcgcgggcgccgaggccgatgggtgaaataccagcgcccaccaggtcattgaaaaagcccggagcctgatcagcgggcaaaacaatctccaggccatcttcgccggtgtaacccgtgcgtgcgataaaccagtcaccatcggcgtggccttcgaagggcttgagctggtgaatcagggtgctgcgcgattgcgtgaccagttcggcgatcttttgccgggcgtggggaccttggatggccagcatggccaactcggggcgctcatgcagttgcacctgatagtcgcccagttgcgcttgcatccaggccatatcctggtcgcgggtggcagcgttgaccaccagccgataagcggcctcggtgcggtagacaatcatgtcgtccaccacgccgccctgttcgttgagcatggcgctgtacaacgcacggccgcagccgtgcaggcgttcgacatcattggccagcaggtgctggagccattccttggcctgggggccgctgacatcgatcacggtcatatgagatacatcgaacaccccgcagtcgcgtcgcacctgatggtgctcttcaacttgcgagccgtagtgcaaaggcatatcccaaccgccaaaatcgaccattttcgcgccaagggcgagatgcaggtcatacagaggcgtacgctgtcccatgggtttctccttccgggcttggcgaaggtgcgcggagctactgtccgcactgaacaccttgatttacaaggcctgcagccacgtccagcgacccgctccgaaagacgaagcgcaccgaatgccgcgcattgtagccgcaagccgtaggactggcacctaaccgatttgccgggcggagcgtcggatcagcccgatcaccggcaacaggcccaccagcaccagggtcaacgccggcaaagaggcccgtgcccactcgccctcactggtcatttcaaagatccgcactgccagcgtatcccagccaaacgggcgcatcagcaaggtggcgggcatttccttgagcacatcgacaaacaccaggagtgctgcgctcaaagtacccggcagcagcaacggcagatacactttgcaaaacagtcgtgggccactcacacctagactgcgtgcagcttccggcagggacgggcggatacgcgccaggctgttttccaacggcccataggccaccgccaggaaacgcaccaggtacgccagcaccaatgccgacaggctgcccaacagcaacggcttgcccgccccaccgagccagctggagacaggcaccaccagttcacggtccagatagctgaacgccaacatgatcgataccgccagcaccgagcccggcaaggcatagccgacgttggccaggctgataccggaacggatcgcccgtgtcggcgccaggcggttggcgaacgccagcaccagcgccacgctgaccgtgatcaaggccgcgatgccgcccaggtaaagcgtgtggaggatcaggcccgaatagcgctcatccagatcgaagcggccgcgctgccagaaccaggccaccagttgcaacatcgggatgacaaacgcgcaggcgaacaccaacccgcaccaactgctggccgcggccgccttgaacccgcgcaggtggtacaacgccttactacgtggccgttcattgctcggtcggctggcgccccgggcgcgccgctcgccgtacagcaccagcatcaccaccagcagcaacaggctggccaactgggcggcgctggaaaggctgaagaagccgtaccacgtcttgtagatggcggtggtgaacgtgtcgaagttgaacactgagaccgcgccgaaatccgccagggtttccatcaacgctaaggcgactccagccccaatcgccggccgcgccatgggcagggccacgtgccagaacgctcgccatggcgattgccccagcacccgcgcggcctccatcaggcctttgccctgggccaggaacgcggtgcgcgccaatagataaacatagggatagaacaccaggaccaggacgatgatcacaccgctggtggagcgcacccgtggcaggcgcagcccggtgccgaaccattcacgcaacagggtttgcacgggaccggagaagtccagcaggccgacaaacacaaaggccagcacataggcaggaatggcgaacggcaacatcaacgcccaatccagccagcgccgaccaggaaactcgcagaggctggtcaaccaggccaggctgacgcccaacagggtcacgccgataccgacgcccagcaccagggtgagcgtgttgcccagcaggcgcggcatctgggtttcccacaggtgcgaccagatctggttgtcgatactttgccaggacagcaacagcacgctcagcggcagcagtacgagggcggcgacggtgaagaccggcaggtaccagcggcgttgggcggggtgggccaaagtcagttctcagtgaatgtctttaattcaactcaatccaatgtgggagggggcttgcccccgatggcggtggatcagtccatgatgagtgaactgatatcccgctatcgggggcaagccccctcccacattttgaccagcagtgtgtcagttccagccggcgcgatccatcaggcggatcgcctcagcctggcgcttgcccgccacttccaccggcaaggtgtccgccacgaacttgccccaggtcgccacttcggctgacggcggcactgccgggttggccgggaactcctggttcacatcggcaaagatcttctgcgcctcaggcgtggtcatccactctaccagcgccttggcggcttccggatgcggcgcgtgctgggtcaggccgatacccgacaggttcacgtgcacgccacggtcgccctggttcggccagaacagcttcaccgccaggtccggtttctgcttgtgcaggcggccgtagtagtaggtgttgacgatacccacgtcgcattgcccggcgttgatggcttcgagcacagcgatgtcatcggagaacacgtcggtggacaggttgttgacccaacccttgacgatctcttcggtcttggccgcgccgtgggtttcgatcagggtggcggtcagcgactggttgtagacctttttcgccgtacgcaggcacaggcggccttcccactgtttgtcagccagggcttcgtaggtggtgaggtcacccggtttcacccggtcggtggaataggcgatggtccgtgcgcgcaggctcaagccggtccaggtgtgttttgacgagcgatattgcaggggaatgttcttgtcgatcaccggggaggtgaacggttgcaggatccccatctgctcggcctgccagaggttgccggcatccacggtgagcagaaggtcggcggtggcgtttgcgccctcggccttgatgcgctgcatcagcggcgcttccttgtcggtgatgaacttgacctgcacgccggttttctgggtgtaggcatcgaagaccggcttgatcagctcatcgatgcgcgaggagtagaccaccacttcgtcggcggcctgcacagtggtgctgccgatcagggtgagtgccagggcagtcaggaggcgcttgggtgccaacatgggtgcggtctctcatttgcaaaaagagggcaaatgataaggactcacatttggtagtgcttggtagaggcgttaccagatgttgcatgacggagattggttgtgggctgatggcctcatcgggggcaagccccctcccacaagggatcgcatttcaatatcagggtttcgcaaggtccgggagatcgccagtcaggccgagagcctgacgcacaaacacggccttggcctcgggcatctggtcgaccatcttcaacccggcgttacgcaaccagcgcaacggcagttggtcggcctggaacagtcgctcaaaaccttccatcgccgccatcagcgccaggttatgcggcatgcgccgacgctcgtaacggctcagtaccttaacgtccgccaggcgctcgccgcgctcggttgccgccaacagcacctcggccaacaccgctgcatcgaggaatcccaggttcacaccctgccccgccaacggatgaatgacgtgagccgcgtcgccgatcaaggccaggccttcggccacgtagcgcttggcgtggcgctgacgcaacggcacacatacgcgtgggtcggcgctgatcacgttgccgagtcgtccctcaaaggcgcgctccagctcgcgacagaagctttcatcatccagcgccatcaagcgctcggactcggccggcgtggtcgaccagacgatcgaacaccaatcctcctgcccatcccgctccagcggcaaaaacgccagcggacccatatcggtaaagcgttgccacgccgtacgctgatgcggctggctgctgcgcacgctggtgacgatggcgttatgcaggtaatcccactcacgggtcgcggtgcctgtcaggcggcgtacggcggagttggcaccatcggcggccaccaccagcggcgcgcgcaacgtgcggccatcggccagggtcagcagccagtcatcgccggaacggcgcatctgctccaggcgcgcattggccagcaggcccaggtcgcagtcgtgcagacggtcaagcaaggcatcctgcaccacgcggttctcgacgatatgcccgagcacctcggcatgcacgctggcggccgaaaagtggatctgcccggtgccgctgccgtcccacacctgcatctcgccgtaagggctggcgcggcgcgagacgatgccgtcccacacgcccagccgctccagaatgcgctggctggcggccgacaaggcgctcacacggggttcgaaggcggcctcgcggtcgaacggcttgacgctcagcgggctgccgtcgagcagcagcacctgcaggccgctgccctgcaacgccagcgccagggcgcttccgaccattccggccccgacaatcagcacatctgcgcgcatgtccatgctttaagcctgtctcactggcggcttgcgccgcacgtaaagggttttgtcgacccgcgccaccagggtgccggagccgtcatgaatctgcaccttgaggtggggcaggtacttctcgccaccttcggtgtgtcgacggacctcgtccagcaaggcctcgtcgatggaaaattcggcatacaccgggcctttgccgggcgaaatgaaatcgatactcgcggccttgtcccacacgatgtagtcgcggcccaggttctccatcagcatcaacatgtagaacgggtcaaccatcgaatacaggctgccgccgaattgcgtgccgacatagttgcggttgtaccagcccaggcccatgcgcactttgacgtgacgaaaatcggcgctcatgtgctgaacgctgacccccgcgcccaggtacggcgggtacagggtcatgacccaacgcaacaatctcgccttgcccaggcgcgcgatcaaccacttacgcatcgggacgcgtgcccaggcccatggcttgccgggcgaaccagcgtttggcgggcggcaacaaatccagccccagcagccccatgtttcggcccagggcgaccaacggttgggcgctgccgaacaggcgcgtgacctggtcggagaagcccacggtgagtttctggtccaggcgctggcgctcgcgatagccctgcaaggtggccagatcacccggcacctgcggcccggccagcaaggcctcggccagggcattcgcgtcacgcagggacaggttgaaaccctgcccggcaatcgggtgcaggctgtgggcggcgttgccaaggatggccaagtgcgagcgcacttgctcctcggcttccaccagcgtcagcggatacaggtgacgggcgccaacctgcttgagggtgcccaggcgatagccgaacacaccctgcaattcactgaggaaactgcgttcatcgagattggccaggcgctgcgcatccatgccgatgcgcgtccagaccagcgcgcagcggttgtctggcagcggcagcaaggccatcgggccttcatcggtgaagcgctcgaacgcctcgccgttgtgggcttcgctcggggtgatgttggcgatcagcgcgctctggttgtaggggcgggttttcacgccgatgcccagttgttcgcgcaggccggagcggccgccgtcagccagtacagcgagatcgcactccagcacggtttcatcgttaagggtcaggcggtagccatcgggaagcggctccatgcgcacgacttcggccgggcaacgccagctgaccacgtctttgtccaggccttgccacaggcattggcccagccaggcgttttccaccacgtaaccgagggccggcacgccctcttccatggcagacaagcgcgcggtggagaaacgcccacggtcggacacatggatctgcttgatcggctcggcgcggcgggaaatgtcctgccacaggcccaggcgctggtagatctgccgggcaccgaaggacagcgccgaggaacgcgcatcgtagctcggctggtagctgtcgcccggcgcgaagggttcgatcagcacgatcttccagccccgggccttggccccggcctgcaacgccagtgccaggctggcgcccaccaggccgccgccgatgatcgccaggttgacccggctcatcgcgcagccgccatcagcgcttcgatatcggcgacagtcttgggcacgccgccggtcaggatttcacagccttgcttggtcactaccacgtcgtcctcgatgcgtacgccaatgccacgccatttctttgccacgttctggttgtccggtgaaatgtagatccccggttccacggtcaacgccatgccgacttccagcacacgccattcaccgcccactttatattcgcccacatcgtgtacatccatgcccagccaatgaccggcacggtgcatgtaaaacaccttataggcttcgctggcgatcagttcgtcgacgtcaccctgcaacaaccccagcttgaccaacccggcggtgatgacccgtacggtcgcctcatgggcctggttccaatgcttgtccggggcgatctccgcgaaggcggcttcctgggaggccagcacaatctcgtagatcgctttctgttccggcgagaacttgccactgaccggccaggtgcgggtgatgtcgctggcatagcagtcgatctcgcaaccggcgtcgatcagcaccaggtcgccgtccttgagcaccgcgtcattctgctggtaatgcaggatgcagctgttgcgcccggcggcgacgatggaaccgtaggccggcattttcgcgccgcctttgcgaaattcataatccagctcggcttccaggctgaactcgtacagcccggcccggctggcctgcatcgccttcacgtgggccgcgcaagagattcgcgctgcctcgcgcatcaccttcacttccgccgccgatttatacaggcgcatgtcgtgcaacagatgatccagggcaacgaattcgttcggtggctgggcgcccaggtgggccttggagcggatcacgttgatccactccatcaggtgccggtcgaactcggcattgctgcccatggccgagtacacccggtcgcggccttcgataaggccgggcaggatgtcgtcgatatcggtgatggggaaggcatcgtcggcgccaaagtcacggattgcgccttcggtgccggcgcgcaggccgtcccacagttcgcgttcggcgttgcgttcgcggcagaacagcacgtactcgccgtgctggcgaccgggcatcagcacgatcaccgcttccggctcggggaagccgctcaggtactggaaatcactgtcctggcggtacacgtgttcgacatcgcgattgcggatcgccacggcggcggccggcaggatcgcgatgctgttgggttccatctgcgccatgagcgccttgcggcgccgggtgtattccgctttggggatatggatcatgggcagaggagtttcctttcttagtgcagcgacggcttgggtgcagccggctcagccgattttttggtctcggtgaacagcagcagcggcgcgacgcgcaggtattccatcacttccatgtagtcaccctcgccgtcttcggactcttccagggcgtcttgcacctgggagatggctgccaggtcctgcagcacttccttggcatcggtgctcagttccaggccgccggcgttcacgccgaagccgtggaggaagccctggcaccattggcccagtgcggcggcacgctcggctagcggcgcgtcgtcggtcggcagcagcaggaccacggtgacgtcatcaccggtcagctcgcccttgaccatctcttgtaggccgatcagcgcgttgcgcacgttgtcggtcggttcggtttccagcagctcggccacgtcggccagccagttgtcggcgtcgaagccgacgccggtgcagctacggcccagcaacacgccgtgcaattcggccggcgagcaggggtggccgctggtgctcagcagtttggagaaagcatcgtacggggagttctgaataggcatggtgagctaggcgccagacggcgcaatgtctagaatggagcgctgtatcctagcaccggcagacgtaccaagactatcaagggcgtcagatcgtttatcctgcagttgccattcatcagacaaatccagtggaacccaatggaagacaccgacctgcaagcgctgatggccagactcgaattgctaattactcgggtcgagcaacttaagagtcaaaacggactcctattagctcaggaaaagacctggcgcgaggaacgcgctcacctcattgaaaaaaacgaaatcgcccggcgtaaggtcgaatcgatgatttcgcgcctgaaggccctggagcaagactcatgagttcaagcaatagcgtcaccgtgcagatcctcgacaaagaatattcgatcatctgcccccaggaagagcgcaacaacctggtgagcgccgcccgctacctggacggcaagatgcgtgaaatccgcagcagcggcaaagtcatcggcgccgaccgcatcgccgtgatggccgccctgaacattacccacgatttgctgcataagcaggaacgccctgacgtgcaggccagcggttcgacgcgtgagcaggtgcgtgacttgctggagcgtgtcgatctggtgctttccagcgatgcagacgcacccaagggctgattgccgcgactgtttaaggtatactcgccccactccctggcgtgtttgccagtcggcgatgtccctgagccgattcgcactaccctggaagttgcacgttgggctggtgtgcatgtccgctagacggaaagccttaaagcctactgcatcttccaccttgaactttcgggttcaagggctaagtcgacagcggctctgtcggggagcctgaattcccaaactcaatgccagtcttcggactggcattgttttatgagccgaaaccatgaccgaacctgcgccgctttcccgtccgcaacttcgacgcatgttgcgcaaagcccgccgcgccctcacgccgagcgagcagcgcaaggccgcccacggcctgtatcggcaactggcacagcacccgctgtttcgccgggccaaacatatttccttatacctaccgacggacggtgaaatcgatccgcgcttgctgctgcgtgcagcacagcgccggggcaaggccacctacctgccggtgcttagcgcctggccacgtaccaagatggtgttccaacgggtcaagcctggtgagaagctgctgcccaatcgctttcgcatcctggaaccacgggtgaacatcagccgccaacgcaaagtctgggcgctggacctggtgctgctgccgttggtgggttttgatgatgccggcggacgcctgggcatgggcggcgggttctacgaccgcagcctggcttacctggcgcgccgccagagctggcgcaagccgacgctgctgggcctggcccatgaatgccagaaggtcgatcgattggcgcaggcgagctgggatgtgccgttggcgggcaccgtcaccgataagcattggtatattgcgaagacgccactggagtcagcggcgccttgaagaagggtcagcgcttgaacggttgcggctgctgctgagccagttcaacgggcgcatcggtcttgttcgaccacaagctttgggcatacccggtggtcacgacgcccagaccaaacaaaatcaccaaaatccatagtaaatccggtttacgttgcatcgattgccccccttcaggcacctcgtacacgatgacaacaacgttccaaagagtccgttgcagctgcgtcaagctttaaaagccggcattctgcggtaacgtgaaccaacacgcaaaccttggcgccaaccgactgtcggtttgtcatcaaattgcaggacaacttgcccaccgcttatttcaggagcccaacaatggcctattggctgatgaaatccgagcccgacgaactctccatcaaaggcctggaaaagcttggcgaagcccgctgggacggggtacgcaactaccaggcgcgtaacttcctgcgggccatggcggtgggtgacgaatttttcttctatcactccagttgcccggagccgggcattgccggcatcggcaaaatcatcgaggcggcctatccggatcccaccgcgttggagcccgaaagccactacttcgacgccaaggccaccccggagaaaaatccgtggagcgcgatcaacgttgcccatgtgcagacctttcccaaggtgctcggcctaggctacctgaagcaacaagccgccctcgccgaactgcccctggtgcaaaaaggcagccggctgtcggtgatggccgtcacgcccgagcaatggcacgccgtgatccatttgatttgactgaccggcatcaacgccccaccggggcaaaccgctcacactaggacgctaacgccgcaggaagcagccatgtcgacgaaccaccacacctcccgccttttcgccgttgccctcatcgccctgttgctgggtgccggtggcttcggttactggcgctccacccaggaccgcctgcccgaaggcctgagcatgggcaatgggcgcctggaatccaccgaagtgcagatcgccgccaagatccccgggcgcctggccgaagtgcgggtagacgaaggcgacaaggtgctcaagggccaactgcttgcacgcatggacacccgcaccctcgaagcccaacgcgcccaggccgaagccgaagtgctgcgcgccaaggaaaacttcgccgccgccgaggccaacgtgcaactgcgccagagcgagcaactgctggccaaccaggaactcaagcgcacccaggagctgtacaagcgcggcttcgccagcagccagctgattgatcaacagcaggcgcgacagaacaccggcaacgccgccgtgattgccgcgcaggcccaggtcaattcggtaaaggccgccattggcgccgccgaggcccaggtcgcccagctcaccagcgagatcgacgacagcagcctgcgcgcgcccatcgacggcgttatccagctacgcctggccgagccgggtgaagtgctgggcgcgggcggccgtgtactgctgttgatcgatcccaatgatcaacacatgaacctctacctgcccgcttccgtgaccggccgtctcaccgtcggcagcgacgcacgcatcctgctcgacgccctgcccgaccagccgctgccggccaggatcagcttcgtcgccgccaaatcccagttcacccccaaggaagtggaaacccgcgacgaacgccagaaactggtatttcgcgtcaaactgcgcctgacccaacccagcgctgtgccccaggccaaaccgggcatgcccggcgccggctatgtgcgcacggctgacatcgactggccggccaacctgcaatgaccgccctggcgctgcaggccacggggatcaaccaccgctacggcaaacagcaggccctggtcgacatcgccttcagcctgccggccggtacgcgctgcgggttgatcgggccggatggcgcgggcaagtcgagcctgctgggtttgatcgccggggttaaaaagctgcaggacggccagttgcaggtgcttggcggcgccatcgacgatcgccgccaccgcaacagcctgtatccgcgcattgcctttatgccccagggcctgggcggcaacctgtaccccgagctgtccatcagcgaaaacatccgtttctttgccacgctgttcggcctgtccaaagccgattgcgaccagcgcatgcacaacctgctgctggccaccgacctcgcacgcttcgccgagcgcccggccggcaagctctccggcggcatgaaacagaagcttggcctgtgctgcgcgctgatccacgacccggacctgttgatcctcgacgaacccaccaccggcgtcgacccactgtcacgtcggcgcttctgggaactggtcgacagcgtacgcagcgaacgcccgcaactgacattgctggtggccacggcctacatggaagaagccgagcagttcgaacactgcctgatgctcgatcgcggcaagctgatcgccgatggcctgagcagcgacttggccgccgcgacacccagcggcaaattggacgaagccttcacccacttccagggtgacagcgcccacgacaaccagccgctggtgattccgccgagggagagcgacaacaccgatgtcgccatcgaggcccatgacctgaccctgcgtttcggcgatttcaccgcggtgaacaaggtcagctttgcgattggtcgcggcgagatcttcggcttcctcggctccaacggctgcggcaagaccaccaccatgaaagtcctcaccgggctgatgccggccaccgagggcagcgcgacgctgctgggcaacccggtgaacgccaaggacctggccacgcgcaagcgcgtgggtttcatgtcgcaaagcttttcgctgtacggcgaactcagcgtgcgccagaacctggtgctgcatgcgcaactgttcgacctgcccaaggccgacagcggaccgcgcattgatgagctgatccagcgtttcgacttgggtgacgtcgccgaacaaccgtccggcgagctgcccctcggcctgcgccagcgtttgtcattggcggtggcggtgctgcatcgcccggaagtgctgatcctcgatgagcccacctcgggcgtcgacccagccgcacgggatgacttctggcgattgctgatcgagctgtcccgcgaacaaggtgtgaccatcttcctgtccacccacttcatgaacgaagcccagcgctgcgaccgcatctccctgatgcacgcgggcaaggtgctggcctgcgatacgccggatgcgctgcaacagcaattccacggcgatacgttggaagccgcgttcgtcacgtgcctggaacaggcccaaggtgaagccgaacccaccgcgccggccaagaccgtcagcgaaaccagcacagcgccagtgagtaaacgcggtttcagcctggcccgtctggtagccgtggccagccgcgaaggcaaggaactgctgcgcgacagagtgcgcatggccttcgccctgctgggggcgatgttcatgatggtgatcttcggctatggcatttccctggatgtggaaaacctcgccttcgccgtctacgaccaggaccagacgccgcaaagccgcgcctatctggaggcgtttcgcagttcgcgctatttcgctgagcaagcgccgatccaggactcgactgaactgcaccggcgcctgcaacgttcggaaatcaaactggccctggagatcccgcccggctttggccgcgacctctacgccggccgccagcccacggtggccgcgtggctggatggcggcatgccgtttcgcgcggaaaccagccgtaactatgtcgaggccgtgcaccaggagaacctgcagcaactggccgaactgagcagcctgccgcgcaacaccccggccgccgccaggctggaaacgcgctttcgctataaccaggacgtggtcagcgtaaacgccatcggccccggcgtgatggcgctgatcctggcgtttatcccggcgatgctcaccgcgctcggcatcgtgcgcgagaaagagctgggctcgatcaccaatttctacgccacgccgctgacccgcctggagtttctattgggcaaacaggcaccgtacctggccgtgagcctggtcaacctgacggtcttggtggcgatgaaccgctggctgttcggcgtgcccttcaagggcagcgccctcaccctggcgttcggcggcctgctctacgtgctggcgaccaccagcatgggcctgctgatttcggccttcacccgtacgcagatcgcggcgatcctaggcaccatgatcatcaccagtctgccgaccatccagttctccgggctgatcgtgccgcgctcgtccctggaaggcgcggcggccttgatgggcatgctgtttccggccgggcacttcctggacattgccgtgggcaccttcaccaaggccctggacctgcgccagttgtggccgcagtgcctggcgctgttcgggttcttcgtcgggtttaccgggctgagcctggtcatgctcaagaagcaggaggcctgatgcataagttcgcgcacattctgcggctggggatcaaggaactgaccagcctgcgccatgacagcgtgttgctgctgtttctgttctacgccttcaccgtcgccatctatatgcccgccgccggttcggtgatcggtgtacacaacgccagcgtggcatttgtcgatgaagaccacagcgctctctcgcggcagatggccgaagcgctgcaaccgcccgaattccaggcgcctgcaccgttggcctatgaccaattggacagagtcatggacagcggcaagtacactttcgtaatcaatgtgccggcgaatttccaggccgacctgttggcggggcgccagccgggggtgcaggtgaatgtggatgccacggcaatgagccaggcgttcatgggggcgggctacatcgggcggattttccagcgcgaactgctgacctacagcggacaagccgatgccgccagccgggcacccgcgcagctcactacccgggcgctgttcaataccaacctggaaggcggctggttcctggcggtgatccagatcgtcaacaacatcaccatcctcgccattatcctgaccggtaccgccctgctgcgtgagcgtgaacacggcaccctcgaccacctgctggtactgccgctgacggcgctggaaatcatgctggcgaaaatctggagcaacatgctggtggtggtgctgtgtacctggctgtcggtggaactggtggtcaagggcctgcttggggtgccgctggccggctcgctggggttgtttctgttcgtgaccgcgctgtacctgtttgccagtacggcgctggggattttcctggcgacgcttgcccgttccacaccgcaattcggcctgctggcaattccagtgattatcccgatgctgttgctctcaggcggcagtacgccgctggacagcatgcccgagtggttgcagtgggtgatgcaggggtcgccgtcgacgcattttgtgagtttgagtgcggcgattctgtttcgtgatgcgggggtgagcgtggtgtggccggatttgctggcactggcggggattgggttggtgttttttgcggtggcgttggcgcggttccgcaaaagcctcgcctcataagcctggatccggcttgttgtggtgagcgggcttgccccgcgctgggcnnnnnnnnnnnnnnnnnnnnnnnnnnnnnnnnnnnnnnnnnnnnnnnnnnnnnnnnnnnnnnnnnnnnnnnnnngcccagcgcggggcaagcccgctcaccacagaagccaggcccataacacttaggaggcttactggatgatcaggttgttgaacaacagatcttccaccaccggcttgcccgtctcgtcattcatcacttgctgggtctgcttcagggcttcctggcgcagtttttctttgccctcgacggtgctcatcgcctcgttggtctgctgggtgaacagggccaccaactggttacggatcaacgcatcgttggctttgacggcggcggccgcttcggtgccggtcacgcgcagggcaatgtcggccttgaacaccttgagtttcgccgtgccatccaggccgtagttgcccacgaacggcgggctcaggctgatatagctgaccttcggcgcctcgccctctttggcttcttcggcctgggccgccatcggcaaggtcagggccagcatcaacaggatccacgctttcacagttcattcctcacattcggttgccgggtagcataacgctagcaaggcagagcacaagcttatggcggcttatcaggcctgggcatgctcgttgacccacgggcgtaccctcctacacttatcggccacgacgccaaaaggaatagtccgatgaaagctgtgctgtgcaaagccttcggccctgccgaaaccctggtgctggaagatgtcgcaagccctgcgatcaagaagaacgaaatcctgctggacgtgcacgcggccggggtcaactttccggatacgctgatcattgagggcaagtaccagttcaagccgccctttccgttctcgccgggtggcgaagcggctggcgtggtcagtgaagtgggcgaaaaagtcggccacctgaaagtcggtgaccgagtcatggcgctgaccggctggggcagctttgccgaacaggtcgcggtgccgggctataacgtactgccgatcccgccgagcatggatttcaacaccgccgccgcgttcagcatgacttacggcacgtcgatgcacgcgctcaagcaacgggccaacctgcaagccggcgaaaccctgctggtgctcggcgcttccggtggcgtgggcctggctgccgtggaaatcggcaaggccatgggcgcgcgcgtgatcgccgccgccagcagcgccgacaaactcgcggtggccaaggccgccggcgccgatgagttgatcaactacagcgaaaccagcctgaaagacgagatcaagcgcctcacggacggcaatggtgccgatgtgatctacgacccggtgggcggcgacctgtttgaccaggccatccgcgccatcgcctggaacggccgcttgttggtggtggggtttgccagcgggcgcataccggagttgccggtgaacctggcgctgctcaagggcgcggcggtggtcggggtgttctggggttcgtttgcccagcgccagccgcaggataatgcggcgaacttccagcagttgttcacttggtacggtgaaggcaagctcaagccgctggtgtcgcaggtgtatccgttggaacaggccgcccaggcgatcaatgaccttgggcagcgcaaggcggttggaaaggtcgtcgtccaaacccgctaaaaatttgaaataccgtcaatgtgggagggggcttgcccccgatagcggtgtgtcagtcacagctatacagactgataaacagctatcgggggcaagccccctcccacttttcgatctccggtgttcgtaagggaacattcattagcgttcatttctggttgtttatagataagaggcgatgctattttcggtaacgaaactgtaacattcgcatccgcagtcaaaacaagaaatctggagctcttgaatgtttgctttctttcgtcctgccgcacatcaggcgcccctgcctgaagaaaaaatagacagcacttaccgacgcctgcgctggcagatcttcgccggtattttcttcggttacgccggctactacctgctgcgcaaaaacttctccctggccatgccctacttgatcgacgagggttacacccgcggcgaactgggcctggcgatgtcggccatcgcgattgcctacggcctgtccaagttcctcatgggcctggtgtccgaccgctccaacccgcgctacttcctgcccttcggcctgctggtttccgccggggtgatgttcattttcggtttcgcaccctgggcgacgtccagcgtgaccatgatgttcattttgctgttcatcaacggctgggcccaaggcatgggctggccgccgagtgggcggaccatggtgcactggtggtcgcagaaggaacgcggcggcgtggtgtcggtgtggaacgtggcgcacaacgtcggcggcggcctgatcggcccgctgttcctgctgggcatggcctggttcaacgactggcatgcggcgttctacgtaccggctaccgtggcgttgctggtggcggcgtttgccttcatcaccatgcgcgacaccccgcaatcggtcggcctgccaccaattgagcagtacaagaacgactacccggaaggctacgacgccagccacgaagatgaattcagcgccaaggaaatcttcgtcaagtacgtgctgcgcaacaaaatgctgtggtacatcgccttcgccaacgtgtttgtctacctgctgcgttacggcgtactggactgggcaccgacctacctgaaagaagccaagcacttcacggtggataaatcgtcgtgggcgtacttcttctatgagtgggcgggtatcccgggcacgctgctgtgcggctggatgtcggacaagatcttccgtggcaaccgtggcctgaccggcatcgtgttcatggcgctggtgaccgtggcgaccctggtgtactggctcaatccgccgggcaacccgatgatcgacatgattgcgctgttctccatcggcttcctgatctacggcccggtgatgctgatcggcctgcaggcgctggaactggcaccgaagaaagccgccggcaccgctgctggcttcaccggcctgttcggttacctgggcggctcggtggcggccagtgcggccatgggctacaccgtcgaccatttcggctgggacggcggtttcgtgctgctgatcggcgcatgcctgctggcaatcgccttcctgatcccgacgctgtggcacaccaacagcgtcagttcggcgcgctaagcacctgagcaaccctttgcacaacgcttgagccgcgcctccaggttcttatctggcatggcgtggctgcgcagggcgttgacggtctgctcgacataatcgcgagtggtgccgtaacgcccgcaagcactttgcagcacatggttcagtacgatatcgggcaagttaccggcgtagctgggcaagtgccgctccaacacaaaccccagcgcctgtacggtactgccatcttccagacggcagctgagccagtgtggccggtaggacgggtaaggcatctcgcgctgccacagggcgtacagcgaggcttccagctgatcttccggcaaacggtaggcaaacccgctgcaggagcccccacgatccaggccaaagaccagccccggcagctccggcgtaccccgatgctcatgggaccacaggtacaggccccggtgataaccgtggacccgtgcccgcacccgctcggtcgaggagcattcagggcgccagatcagcgaaccataagcgaataaccagaccggcccacccttatgccgcgccatggtggcctgcatcgagctcatcaactgttcgtgagtgagttgcggcccaagatcgagccgcggagggtaagccaattgcaaaagatcggattcaataacggtcatggcaaatcgcttaggtctcctgtgctttaccagttgtaggcaactttaccgtaatagaacgcaccgctgtaaccgtacggcgaaaaagtgctataggccaaattgccaccgctgctggcgaaggcattgaccttctcagggtatttatcggtaacgttgtcgccacccagggtgaaggtccagttcttcaacttatagtccgccgacaaatccagcacccaggccgccttgaaggtctggtcgttgaccttgtctgcctggtagctggtgaattcaccatagcgcaccaggttgctgtgcagcgcccaattgccgaatgtgaagtcgttacccaggctcagtttgtgctcaggcgtggtgtcgcccagcaagccgctcttttcgcgacggtccacccgcaccaggttggcacccaggctatcgaggatggccgggttgggcttcacgtccgtcacccgggtatggttgtagttgtagcccacggtgctgttccagcggatgccgttatcgaattgatagcgatagttggccaccaggtcgacgccgtcggtgctggtgtcggtggcattggtgaagtagcgggcggtggtgtagttgatattgccgacaccgttggcgcgcagataggcctgggtggccgggtccagattgaggttggacgacaggctgatacggtcgcggatatcgatgcggtacacgtccacggttactgtcaggtcgtcggcaggctccagcactaggccaaggctatagttgcgcgacttctcggccttgaggtcttccgcgcccagcaggcgggccacctggctcgatgccgggaaagtgccggcctcgcggatgtcactgccgatcaactgcgacgaggtaaacgcaaagttctgctgcgccagggacggtgcgcggaaacctttggagatactgccgcgcaaggccacctgcggggtgaagtcgtaacgggccgacagcgaaccgctgacattggagccaaagtcactgtaatcctcatgccgcacggcggccgatgcgctgagtttttcggtgaagttggtttccaggtccaggtactgggcccagttgtggcgcgaactgctgccggcgtcggcatcacggaagccgccgaggcccgagctgccggtctggtagtaggacgccggttcacccgcttcaatctcatacccctggcgcaggtattcaccgccaaaggccacggagaccgggtatggcaggaagcccacgtcgaactcacgggacaggtcgaggctgacttgcttctggtcgttgctcagggtgccgttgtcgaacttgcgcggcgtggccaggcccagggaggtgttgatggtttcggtgctcaactcgtactggttcttgccgtagttggccgagaggtcgtagtgccagtcgtaggcaaacagcccgcgcaggcccaccaccagcgaggtgtcctccaggttgcccttgatcaacggcaggtagccgttggggttgagcgccgcaatgttgttggaagcgttgctcgcccggtagaacgccgccgtctcgccgcgccgcttgctgtagccgccgaaagtgtagaactcggcggcatcgttgaacgaatattccgagttgaactgcaacttgccttcattggtggccggttcgccctggcggaacacgcgctggccgtaggtggtggagccgacactggctgggcggtaatcattgccggcacggttggtgtaatcgttatcggcaccttcggccgagaggttgatgaagccgctatcacccaatgccaggccggtattgccgctgacattacgctggataccgtcgcccttcttgtattcgccgaacttggtagagatcgagccgccatggtcggcgtgcttgaggatcacgttgatcaccccagcaatggcgtccgagccgtagcgcgcggaagcgccatcgcgcagcacctcgatatggtctaccgccgacagcgggatcgcgttcaggtccgctggcgccgagccgcgtcccaccgcaccgcccaggttgacgaacgcgctggtatggcgacgcttgccgttgaccagcaccagcacctgatccggcgacaggccgcgcaactgcgcaggacgcaccagctcagcaccgtccaccaggctcgggcgcgggaagttgatcgatgggatcagccgcgccagcactgcgcctagctcatcggagccggtgctgcgcagggtgtcgccggaaatcacatcgatgggtgacagcgaagcactggccgtacgctcctgggcgcgggtgccggtgacgatcacggtgtcgagcttgggtgtatcggtggccgacgtttcggccgcgaagacaggattgaaacccacggcggccagcaaattggctgacaaaatcgccgtgtacagcgcgtgttgcttgtagctccccataccgctcccctttgaatcaaaaaccagaacgtcgtgctctgagttcttacgatcgatccgactggcgggcggtggcggtcagtgattagtggttgtgaaagagtcggtagtccgttgcgatatagcttaaggatatttatgtaacaaattaaatacctttaaagcataagtgattgcataagcaaactcgcccattcatcaggattgcgcgggccaatcccggtagtttcagccccggttcagcctgggaacgtgccaaaccgtcaaaatggcgcccaccttatgacccacctagccgagcatcaaaccgactatcgaggtcgcacccatgaaaaaattccgactgcctggcctgctgttcctggcccaggccaccaccgccctggcgggcgaaacaccggccaccgaggacgacaaaggtttctggtacgcgcagaccagcgtctacacccggcactttgcgccggacccggaccacaacaacaaccaggacctgatcggcctggagcgcaatgaagcctcaggctttgtgtatggcggggcgacgtttcgcaactcgttcagccagcgctcgtactacgcgtacgcgggtaaacgctacgacatggccgactatccggtgtatttgaaactgacgggcggggcgatccagggctatcgcggcaagtaccgcgacaagatcccgttgaaccgtttcggtgtggcgccggtgatcattccgtcggtgggcacgcattacgggccagtggcggcggaattggtgttgctggggttcaacgcagcgatggtgacgaccggcgtacgattttaagcacgcggcgcataggcaaacacgtcggcgcgcatctggtgcgcatccatgccggcttcgaccagcgcatccagggtgccatagatcattgccggcgagccgctggcgtagacgtgcaccgacttgaggtcggcaatgtcttcgcacaccgcttcatgcaacaacccgcagcgcccttcccaaccgcacaggtcgctgacgactttgtgcaaaaacaggttgggcagttgcaaccattggtcccagtgttcgatctcgtagaaatcttccgggcggcgcacgccccagtacaggtgcactgggtgcttgaagccggaggcgcggcaatgttcgatcaggctgtgcatctgcgccatgccggtgccggcggcgatcaacaccagcggcccgtccggcagctcggccaagtgggtgtcgccaaacggcagctcgacgcgagccatctggttgcgttgcagttgcgcaagcaaagtgcgggcactgtcctcgcgggccagcacatgcaactccagctcacgtccggcatgaggcgcagaagccagggagaatgcggatttctcgccgttctcccgctcgatcatcaggtactggccggcgtggtaacgcaccgccttgccggccggtgcacgcaggcgcacccgccacacgtcgccaccgacctctacgcattcactcaattggcacgacagtttgcgcaacggcaactctcccggcgccagcacgccatcccacaacacaacgcaatcttccagcggctcggcaatgcaggtgtagaactcaccgtgatcacgcacttcaccggcctgctgtacgcggccttccaccaacagcgcggcgcacacatggcacacgccgttgcggcaggcctgtgggcactcgtagcccaggcgacgcgcgccttcgaggattcgctcgccagggaccagttccagcacggcgccggaaggttgcagggttacacgcatcaatctattcccaattctttccagatcgcatcgacacgggcggtgacggcttcatccttgacgatcacccggccccactcgcgggtggtttcgcccggccatttgtgggtggcatccaggcccatcttcgaacccaggcccgacactggcgacgcgaagtcgaggtagtcgatcggcgtgttgtcgatcatcaccgtgtcgcgcttggggtccatgcgcgtggtgatggcccagatcacgtcgttccagtcgcgggcgttgatgtcgtcgtcggtgacaataacgaacttggtgtacatgaactgtcgcaaaaacgaccacacaccgagcattacccgcttggcatggcccgggtacgacttcttcatggtcacgatggccatgcggtacgagcagccttccggcggcaggtagaagtcggtgatctccgggaattgcttctgcaggatcggcacgaacacttcgttgagcgccacgccgagaatcgccggctcatcgggcggccggccggtgtaggtgctgtggtagatcggcttgatccgatgggtgatgcgctcgacggtgaagaccgggaagctgtcgacttcgttgtagtagccggtgtggtcgccgtaagggccttcatcggccatttcgcccggatgaatcacgccttcaaggatgatttcggcggtggccggcacttgcaggtcgttgccacggcatttcaccagctcggtgcggttaccgcgcagcagaccggcgaaggcgtattcggacaggctgtcgggcactggggtcacggcaccgaggatggtggcggggtcggcgcccagggccacggagaccgggaacggtttgccggggtgcttttcgcaccactcacggaagtccagcgcgccgccacggtggctcagccaacgcatgatgaccttgttgcggccgatcacttgctggcgatagataccgaggttctggcggtccttgttcgggcctttggtgacggtcaggccccaggtgatcagcgggcccacgtcaccgggccagcaggtctgcaccggcagcatggcgagatcgacgtcatcgccttcgatgaccacttcctggcacaccgcgtccttgaccactttgggtgccatggcaatgatcttgcggaagatcggcagcttcgaccaggcatccttcagccccttgggcggctcaggctccttgaggaaggccagcagcttgccgatctcgcgcaattcgctgaccgactcggcacccatgccaaaggccacgcgttcgggcgttccgaacaggttgccgagcaccgggatatcgaagccggtcgggttctcgaacagcagcgccgggcccttgttgcgcagggtacgatcgcaaatctcagtcatttccagcaccggggaaatcggcatctggatacgtttcaactctccgcgctgctcaagttgctgcacgaaatcccgaagatccttgaatttcattaaccatgccacccgtaaaataggcgtacatcctacctgctccagggtgcgtttgcctgccagcagcgcttaaaaaacgggcacaaaaaaatggcgcccctgggggcgccattcttcaggacctgaaacgtcgtattacttacgcttcatcgacaggaagaactcgtcgttggtcttggtggttttcagcttgtcgaccaggaactcgatggcggctacttcgtccatcgggtgcagcagcttgcgcaggatccacatgcgctgcagctcgtcgtcagcggtcagcaactcttcgcggcgggtgccggaacggttgatgttgatcgccgggaacacgcgtttttccgcgatgcgacggtccaggggcagttccatgttgccggtacccttgaactcttcgtagatcacttcatccatcttcgaaccggtttcaaccagtgcggtggcgataatggtcagcgagccgccttcttcgatgttgcgcgcggcgccgaagaaacgtttcggtttctccagggcgtgggcatcgacaccaccggtcaataccttgccggagctcgggatcacggtgttgtaggcacgggccagacgggtgatggagtcgagcaggatcaccacgtccttcttgtgttcgaccaggcgcttggccttctcgatcaccatttcggcaacctgcacgtggcgggttggcggctcatcgaacgtcgaggcaaccacttcgccgcgcacggtgcgctgcatttcggttacttcttccggacgttcatcgatcagcagcacgatcaggtgaacttcaggattgttacgcgcgatgttcgctgcaatgttctgcagcatgatggtcttgccggctttcggcggcgcgacgatcaggccacgctggcctttgccgatcggggcgcacaggtcgatcacacgaccggtcaaatcttctgtggaaccgttaccggcttccatcttcatgcgcacggtcgggaacagcggggtcaggttctcgaagagaatcttgtttttcgcgttctcgggacggtcgaagttgatcgtgtcgaccttgagcagggcgaaataacgctcgccttccttcggtgggcggatcttgccaacgatggtgtcaccggtgcgcaagttgaagcgacggatctggctcggcgagacgtagatatcgtctgggccggcgagataggacgcgtcagcagagcggaggaagccgaagccgtcctggagaatctccagcacgccatcaccggagatttcctcgccgcttttcgcgtgcttcttgagcagggagaaaatcacgtcctgcttgcgcgaacgggccatattttctatgcccatttcttcggccaattggagcaggtcggtaatcggcttttgcttgagttcagtcagattcatataggaatgacgtaatcatttatggaggggggaaattaagcttttggcttaatgaggccgcgccgcagagaaggcgacaggatcgcgtactaatcgaaaaggaatgcgtcggcgacggcttgcagggggcagtggagaaaccagtgcggggccgaatgtaccacctgagtttcggagcgtctagccctgtttcacgaaaaagccccgctatttgcggggcttttttgacgacgcttagatgttcgcgtcgaggaaagcttgcagctgagacttcgacagcgcgcctactttggtcgcttcgacgttgccgttcttgaacagcatcagggtcgggataccacgcacgccatgcttggcaggggtttcctggttatcgtcgatgttcaacttggcaatggtcagcttgccttcgtaggtagtcgcaatgtcgtccaggactggagcgatcattttgcaagggccgcaccattcagcccagtagtcaaccagcaccgggccttgagccttgagtacttcggcctcaaaggtcgcgtcggtgacgtgcttgataagatcgttgctcatggatgtctccggattgtaagcaaaaaaaacgtggcccatcatagctgcccttcccccgttcaggaagccgcctctgattgagtcttcctatgatggcccatgagtttgggtatcgcccaactcagggcgtgacgggggtcacgaaggcaataccggtgcgcaacgccgcattgcgcacgtgttcctgcatggttttctgcgccgccgcgctggcgcgtcgggccagggcgcgcactatccggcggtgctcctgccaggtttccatggcccgttccggtcggatgaacggtagcttctggctctccagaaaaacctcggcactcgcgctcaggatgctcaccatcgcctggttgccactggcgagcaggatgcgctggtgaaattcgaagtcgagccgggcggcggcttcgaagtcgccggccttgaggaccttgcgcatggcctcgacattgtcttccaggctgtccaactcatcgatggtcagcgtcaccgccgccagccccgccgcaaaaccttccagggcatagcgcaactggaagatatccagtggcgtggcctgcgcagcgaagggccaggcaaaccccggcgcctcctcggcggtctgcacgaacacgcccttgcccggctgcacactgaccacacccaacgcgctgagggatgacaacgcctcgcgcaacgacgcccggctcacccccaactgcaccgccagatcccgttgcgacggcaacgcatcgcccggtccgaagccttgctccttgatcagtttgcgaatggcctgcagggccgcttccggtacggcttgggcgatggaattcataaaaaactcaaggttccagtcaactgagtggctagttgtaaagctattcgtggcgggcggcaagccacgccccaaaggggctcgcgaggttttgccgacgctcgaaaacagtgcgcaaagcccctgcactgttcagaccagtccgaccaccaaaactcaataaatactggccctgcagacgattcagaaggtgatggcatgcgctgtgcactgggcaaatccagaaaatcccttcgcccttctcggagagttgccatgaccaagcgctacagcgccctgcttactgccctgtttgccagcctgatgctgagccaggcacccgcccaggccaatggtctggacgacatcgtcgcccgtggcaccctcaaggtcgccgtaccccaggacttcccgcccttcggctcggtcggccccgacatgaagccacgcggcctggacatcgacaccgccaagctgctggccgaccagctcaaggtcaagctggaactgaccccggtcaacagcaccaaccgtatcccgttcctcaccaccggcaaagtcgacctggtgatctccagcctgggcaagaaccctgagcgggaaaaagtcatcgacttctccaaggcctacgcaccgttctacctggccgtgttcggcccgcctgacgccgccatcagcagcaccgacgacctcaagggcaaaaccatcagcgtgacccgtggcgccatcgaagatatcgaactgaccgccgtcgcccccaaggaagccacgatcaagcgcttcgaagacaacaactcgaccatcgccgcctacctggccggccaggtcgacctgattgccagcggcaacgtggtaatggtggcgatcagcgaacgcaaccccaaacgcgtacccgcgctgaaggtgaagctcaaggactcgccggtgtacgtaggcgtgaacaagaacgagccggccctgctggagaaggtcaaccagatcctgatcgcggccaaggccgatggcagcctggaaaagaacgctatgcaatggctgaaagagccactgcccgccgatctctgaaagcggagctgacccatggcgtatcaatttgactttgtgccggtgctggccaacaccgacctgctgctgcgcggcgcgctgttcaccctcgagctcacggccatcggcgccatcctcggcgtggccctgggcaccgtcggcgctgtggtgcgggcgtggaagatccagccgttcgcctggttcttcggcgtttatgtcgagttgatccgcaacacgccgttcctggtgcagttgttcttcatcttcttcggcctgccgtccctggggctgaagatcaccgagtggcaagccgccgtgctggcgatggtgatcaacctgggcgcgtactccacggaaatcatccgcgccggtatccaggccattccgcgcgggcaactggaagccgctgccgcgctggcgatgacgcgcttcgaagccttccgccacgtggtactgctgccggcgctgggcaaggtgtggccggccctgagcagccagatcatcatcgtgatgctcggctcggcggtgtgctcgcagatcgcgactgaggagctgagctttgccgccaactttatccagtcgcgcaacttccgtgcgttcgaaacctatgccctgaccaccctggtgtacctgtgcatggcgctgatgattcgccagttgctcaactggatcggccgccgcttcgtaatgaggaacagtcgatgagtgatttctcgttctgggacatcgtgcgcaacctggccaccggcctgcaatggacgttgctgctgtcactggtggcgtttgtcggcggcggcgtgatcggcttgctggtgatgacgatgcgcatcagccgcaacgccttcccgcgcaatgtcgcacgcacctatattgagctgttccagggcacgccgctgttgatgcagctgttcctggtgttcttcggcattgccctgctcggtgtggatatctcgccctggctggcggcggcgattgccctgaccctgtttaccagcgcctacctcgccgaaatctggcgtggctgtgtcgactccatcgcccacgggcaatgggaagcgtcggccagcctggcactcaacccgctggagcaactgcgctacgtgatcctgccccaggcactgcgcattgcggtggcaccgacggtgggcttctcggtgcaggtggtcaaaggcaccgccgtgacctcgatcatcggcttcaccgaactgaccaagaccggcggcatgctcgccaacgccacgttcgaacccttcatggtctacggcctggtggcccttggttacttcttgctctgctaccccctgtccctcagtgcccgctacctggaaaggagactgcatgcctctgcttagaatttccgccctgcataagtattacggcgatcaccatgtgctcaagggcatcgacctgaccgtggatgaaggccaggtggtggcgatcatcggccgcagcggctcgggcaaatccacgttgctgcgcacgctcaacggcctggaatccatcaacgacggcgtgatcgaggtcgatggcgaatacctcgacgccgcccgtgcggacctgcgcagcctgcggcagaaagtcggcatggtgttccagcagttcaacctgttcccgcacctgacggtcggcgagaacgtcatgctcgcgccacaagtggtgcagaaagtacccaaggccaaggcagcccaactggccaaacagatgctggaacgcgtcgggcttggcgagaagttcgacgccttccccgatcgcctgtccggcgggcaacaacagcgtgtggcgattgcccgcgccctggcaatgtcgcccaaggtgctgctgtgcgatgaaatcacttcagcgctggacccggaactggtcaatgaagtgctcagcgtggtgcgccaattggccaaggacggcatgaccctgatcatggtgactcacgagatgcgcttcgcccgggaagtcggcgacaagctggtgttcatgcaccagggcaaggtgcatgaagtgggcgacccgaaggtgctgttcgccaacccgcaaaccgccgagctggccaacttcatcggttctacggaacagccgaactgaccagctcgaattgaccacgcccctccagcagcatctcccgacgtactgagagggcatcggccggcaattgaaccgctatctccaccagggccgtcagccgacggcccgtcaccggcgcatcgcctgctgtcgcatacaacgcccgccccggtaacagctgcccaccagaggcttcatcgggctgccacgacaccggcctgccgtcgacctgagcctgcctcaggttcaaggtgaaacgcccttgccgcccgaattgaaagccttgtgcatcggcggcgacaccgctgaaacgcagcgccattgccgcaggatccgcgcaaagcacgctcaggtgcagcgtacgcggcgtgtcgagcgtcattgtcgccctgccggaggacgcttgcgaagggcgaatcaccccgtagtcgacccggtgctcgctcaaggtcatccggcagttttcagcctgcgcctggctcgccacaagggccacccacaacagccacagacttcggcgtttagcgagcatggcagaccaccggcgcggtttcatagaattggtcatcgtcaggctcttgctccggattgacttgcagcagacaggattgcgaattcggtaatgaaaccttcaaggttttcagcccatcgatgttgctgaggaaaatcatgccctcacccaccacactggtcacaaaactgttgtcctgcccgaacaccgccgccccttgaggcaagggccgaccctgttcgtcctgggcttcgagcaatagacgacgcactttcaccacatcaaagttgagaatattgactgacccacgaccggcagcgagcactttggtcccgttcttcaagtcgacgcgtttgggcagcgactgggtctgaacctgcagatggttgttgctgtaggcctgcagaccggggatcactgcctgaccgctgaaatcggtccataccggcccttggggcgtcgagaccttggccgctccgatatctcccaccgacacaatgccaaaggtgtcctgcacggcatacggcgagaaggtcacgccgtgctcatgggccacgatgccgccttgcagttggccggaatagttggtgttcgacgggtcacggctgacgcccaggctcacgcgggtatacagcggcaagacatccacacgaccacgcacgctttgctcccgttctttcacgtcccgatcaacaccgacttcatagttcacatagtcgttgacccgctcactgagcgcggtaccggcatccagccggtcacctcgacgactgacgtaagtgctcatgcgccgatcattgccgaggggcatcgtgacctgcagcctgacagacgtaccctcgtccagccgctcgtcgcggcggccacctcgaattgggtccgggcgccgaggggcggtcgcaccgacctgagcgtcggcgatgagtgcgacacccacgccattgaaggtgtcgttccatgaggcaaagaggtgatcgttggattgcccgtcaaactgcgagttacgggtgaaaccgagggagaaaccacccagggacggcgccgcccagctcaaacctgccgtgtactggcgtttgaaacgcgcatcgaggttatacccccgcgacgcctgaccggcgtccagtacctcccggtagccgcggctctgcgtcgaggcgctcaggttgatatcaaggttggcgaataatggagtccccaaagacagcgtgctacgtgcaccgcccacctcatcttgagcatcacgggacacgttatggcgcacgcccacggtcacccgatggaaaaacacactgctcagggccccccctgccgactggtactcatcggtacccagcaaaccgaaacccagcgacgaatgcggactaagcccccaagtgccgctgcccatggcgaccacgggcgactcccgactttcggtagacgtttcacgcaccttaccgagggaaaagtagtagcccggcgcaaccggaaccccaccacgaaaggaagcagcaggcaccacgaaactgcgctttgccccacgcacgtcgatcacgctcacatcgaggtcgctggtactgttcagcaacggtaaaccggtcagcctgaacgggccttccggcaccagggtggagtgaatcaatgcgcccgactgacggacttcgacccgcgactgactttgcgccagcccttcgactaccacgttgctgtcgcccgcgccggtacgctgctggccatccggggagaactgcaagccggtcagctgtaccccgccaaagatcgggttgttgctggaaatctgtcccacctggaaggtcgactgcaacgccgcgatgtcacgctgggcataggcattcacgtgttcggtgcgcgtcttgccattgtcggaaacataaaactggcgactgcgaacaatccagttccccaggttgaatcccgcctccgtataggccgatacgaagcgacttggcccactgcgcgagtgggtatcgaaacccaatacgtcgtagttgaagatggcggccgcgccaccctcggaaaaattaccgccctcccattccggtgctcgcagggactgggtcggcaccaccagggtgacctcatcgctgctggggcgcagccgcaccatggtcgctgggtattctccaacaaaatcatggcatgcctgatcgggagtaacgccctcgctcagaagcctggacggggtgatcagaccggcctttgccagtaacgccggggtgaagcacaactgaccctggtaatcgaaacgggcgtcaaccaatcccagcggcgtgccattgactcgcagtccgactatatggacaccttcgcgaaagcgcgctgcgctgcgaaagtattcagacacctgtggatcaatcccgagggagttcaatgcgaccaggtcaaagccttcccccagcccaaccgctgcgctcgtgcctggcagactccacagcgtcgcgagccccaataaaaacctggagcgcgcctgggcggaaccactgcacggtacccgtttggcggggcgacctgattgccggatctttttcataggcccgtcaatccgcttctgccgtgacgggcgtgcggtaactgtccaccgtaaacccatacaccgtggccgggtgaatctccaccgccaccactcccgccaccgagcctgccgacgcgagcgtcagcacttcgcccggcaggatgtaggttcgcggcaacgttgctacgcttgcctgcggatgcagctgtacttccatccccaggcggacgacgtaagcgctgttgttgtggaccctcaactgatcccctttacgttcccatgtcagcaactgccagggcgcgtcatgcctgggtaagcctttggggtgcaggatcaatggcaggctctggcgcaaggtgataccaatggtcgcagcgccgggcgcacgtgcctcagggataccttcaaaggaaacgcgtttcaggcgctgggtcttgagcggctgcttggcggtactgatgaagcgaacaagttgtgtctcgcccgcttcaacccgagtaatcgggggcgtcacgatcaacaagtgttcgaggtcttcgggtatgttttgtatgactgaatgaagcaaggcagggccaggatccgtgtttttaatattaagcgttgcctcgccttcttcttcattcagaataacaacggttgtttcgggctgcatgccgtcggctacggccatgccgcacaaaaaaagggacacgcttatatatcgcaacagcgacataacggttattgataaaacattcaccgattttccccacagccaaaaagtcgaacatcaacaattgcacacattaaaactgccgacatttagcggagacacgaaagtatcttcagcttaatgtcggctgttaaaggcgtagttagatgtaatccactgacagactggtgcgaccgtccagcgttacatcgcgggtcaggtccaaatcgttcgtgcggttgataacggctttcacttcaagcatgccagtcagactggtgatgaatgcaggcaccgcagtggtaccactacgccacgaatactgggcaggcgattgggcgaccttgccgtcactgcttccccacgccgccccctgactgctgcgcatgatggggttcagggccccgctggacgattgcaggtttttgagagtaacggagtacccaccggtacgcttgccattggcgatacccaggccgtagttttgagcctcggtgaacccagcaccgaggatgcctggcaccttgctcgcggattgcaggtcactcagcgctactcgaaactgcgcgggcgtttggccgcaactgatgttcaagttgaccgtttttggtgcaagagaagtgaactgcgtcggggacaggcttgcggctggaattgtctggtaatcgacgatgccgccgccggtgaggctaaggttgcaggccaccggtttgatagtccctcgtacaatcagttcagccacattcgttgcatgagccccgatactcgcggccaggcaaagaacacccactgtcataccaagcatttttttcatagttaacctgtcatctgtaatcagcaggtgaatttacgatgataagaattctgaccatacataaataacaccacggcgaaattgccggatgacagtctgtcgttttggcgcccgattaaagaatcagatggggcgccagttgttgtgggaaccgtaaaaacaaacagtgagccatatcaaaacaccgagtaggcacaaatacataaccaataaattattaaccgcccccttgtaggcaaaatcataaacagcatgatgacaataaaaagttaaagactcctacaaagataaaaccgctttcgttgagagccctgaaaaccgccttacatttcccacaagaattcctcacagacacccgcaggaaaattaccggcgcactacgcgttggctccagcggtcgatcgtggcacgatggtcaggttatcgaccgagaccccaaaccatgccgcaatcccaagccaagaatctgtccctgatcgccgccatcgacctgggctccaacagctttcacatggtcgtggccaaggcccagaacggcgaaatccgcatccttgagcggctcggagagaaagtgcaactggctgccgggatcgacgacgagcgccagctcaatgaagaatccatgcaacgcgggctcgattgcctgaagcggtttgcgcaactgatcaacggcatgccgctgggcgccgttcgaatcgtcggcaccaacgcgttgcgtgaagcgcgcaaccgtggcgaattcatccgccgcgccgaggagatcctcgggcacccggtagaagtcatctccggccgtgaagaagcccgtcttatctatctgggcgtgtcccacaccctggccgacaccccgggcaaacgcctggtcgccgacattggcgggggcagtaccgaattcatcattgggcaaagattcgagccattgttgcgcgaaagcctgcagatgggctgcgtcagcttcacccagcgctacttcaaagacggcaagatcaccccggcgcgctacgcccaggcctacacggcggcgcggctggaaatcatgagcatcgagcacgccctgcatcgcctgacctgggatgaagccatcggctcgtccggcaccatccgcgccatcggcctggcgctgaaagccggcggccatggcaccggcgaggtcaacgccgaaggcctggcatggctcaagcgcaagctgttcaagctgggggatgccgagaaaatcgacttcgacggtatcaagcctgatcgtcgcgcgatcttcccggccggtctggcgattctcgaagcgatcttcgatgctcttgaactgcaacgcatggaccactgcgacggcgccctgcgtgaaggcgtgctctacgacctgctgggtcgccatcaccacgaagacgtgcgtgagcgcacgctcacttcgttgatggagcgttaccacgtcgacctggaacaagccgcccgcgtcgagcgtaaagccctgcacgccttcgaccaggtggccgaagactgggacctggaagacggcgtctggcgcgaactgctgggctgggccgcgaaggtgcatgaagtgggcctggacatcgcccactaccattaccacaagcacggcgcctacctgatcgagcactcggacctggccggtttctcccgtgaagaccagcaaatgctcgccctgctggtgcgcggccatcgccgtaacatccccaaggacaaatttgctgaattcggcgacgaaggcatcaagctgatccgcctgtgcgtgctgctgcgctttgcgatcctgttccaccacatccgtggcacccaggaaatgccccaggtgacgctgcgtgccgacggcgacagcctggacgtggtgttcccgaaaggctggctggatgagaaccaactgacccaggcggattttggccaggaagcggagtggttgacgcgagtggggttcagcctgaacctgcgttgacctgacctgaagaacgctgcaaaacaaatgtgggagggggcttgcccccgatggcggtggaccagtcaatgaatctgttgactgacactccgtcatcgggggcaagccccctcccacattttcagaccgcgtcggtttttaattcaccgacagaatcgggctacccaacttctccaacaacgtcgcctgcgcactgcgcgggttctggttgccggtcggcgtgttgcgcacgtagcgaccgtccgactgcaggctccagctgtgggtgttgtcggtgaggtagctttccagctccttcttgacccgcatgatcaacttcttgccttcgaccgggaagcaggtctctacacgcttatcgaggttgcgctccatccagtcggcgctggagaggaacatctgctcttcgccgccgttgaggaagtagaacacccgcgtgtgctccaagaagcggccgatgatcgagcgcacatgaatgttgtgcgaaaccccgacaatgccagggcgcaggcagcacatgccgcgcaccactaggtcaatgcgtacgccggactggctggccttgtacagcgcgcggatgatcttcggatcggtcagcgagttgaacttggcgatgatgtgcgccggcttgccgtcgagggcgaactgggtttcgcgggcaatcatgtcgagcatgcccttcttgagcgtgaacggcgcgtgcagcagcttcttcatgcgcaaggtcttgcccatgccgatcaactggctgaacaatttgccgacgtcttcacacaaggcgtcgtcggaggtcagcaagctgtagtcggtgtagagcttggcgttgccagcgtggtagttgccggtgcccaagtgggcgtaacgcacgatctcaccggcttcacggcgcaggatcagcatcatcttggcgtgggtcttgaagccgaccacgccgtagatcaccaccgcaccggctgcttgcaggcggctggccagttgcaggttggactcttcgtcgaaccgcgcacgcaactcgatcaccgcggtgacttccttgccgttacgcgcggcgtcaaccaaggcatcgacgatttccgagttggcaccggaacggtacagggtctggcgtacagccaacacatgcgggtccttggcggcctggcgcagcaggtcgaccacgggcgtgaaggactcgaacgggtgcagcagcaggatgtcctgcttgctcaccacgctgaagatgttctcgctgttttgcagcagtttcgggatctgcggggtgaacggcgtgtattgcagctccggatggctgtccaggccggtgatgctgaacaggcgcgtcaggttcaccgggccattgacttgatacagctcggtctcgcccaggttgaactgcttgagcaggtagtccgacagatgtttcgggcaggtgtcggccacctcaaggcgcaccgcatcgccgtagcgtcgcgagaacagctcgccgcgcagggcacgggccaagtcttcgacatcttcggagtccagcgccaggtcggcgttacgggtcaggcggaactggtagcagccttttaccttcatgccctggaacaggtcatcggcatgggcatggatcatcgacgacaggaatacatagttatcaccagcgccccccacctcttccggtaccttgatgatccgtggcaacagacgcggcgccgggatgatcgcaaggcccgagtcgcggccaaaggcgtcgataccttccagctccacgatgaagttgaggctcttgttcaccagcaacggaaacgggtgcgtcgggtccaggccgatcggtgtgatgatcggcgcgatctcgtcgcggaagtaacgacgcacccaggtcttgatcttggtggtccagtgacggcggcggatgaagcggacctgatgtttttccagctccggcagcaggatgtcgttgaggatcgcatactggcggtccacatggccgtgcaccagctcgctgatgcgcgccagtgcctggtgcggctgcaggccgtcggcgccggcctgttcacgggcgaaggtgatctgcttcttgaggccggcaacacggatctcgaagaactcatccaggttgctggagaagatcaacaggaacttgagccgctccagcagcgggtaggactcatccagcgcctgttccagcacgcgaatgttgaattgcagttgtgacagctcgcggtggatgtacaggctgctgtcatccaggttggtcaccgccgctaccggggccggcacgggcggttcggccaccacgacgggcgcggcgggctcatgctccggcggggtctcggtgacttgttcaaccaccgggtgagcgtcttttacggcaacttctgtgagtccttcggtattcatcgagtgttcctgtgagggctattgttgctctctaagcaattgggcggcgcgggcggcgaagtaggtcaggatgccatcagccccggcgcgtttaaaggctgtcagggattcaaggatcaccccttcactcagccatccattctgtattgcagccatgtgcatcgcgtattcgccactgacctgataaacaaaggtcggcaccttgaattcgtctttgacccgataaaggatgtccaggtacggcatccccggtttgaccatcaccatatcagcgccttcggccaggtcggccgccacttcgtgcagggcttcatggctgttggccgggtccatctggtacgaggccttgttggccttgcccaggttcagcgccgagcccaccgcatcgcggaacgggccgtaataggcgctggcgtatttggccgagtaggccatgatccttacgttgacgtggccggccagctccagggcttcgcgaatcgcctggatgcggccgtccatcatgtctgacggggcaaccacctgggcgccggctgccgcatgggacaaggcttgcttgaccagcgcatcgacggtgatgtcgttttgaacatagccgtcttcgtcaagaatgccatcctgcccgtgggtggtgaacgggtccaacgccacgtcggtgatcaccccaagctgcggaaaacgctcgcgcagggcacgggtagcacgctgggcgatcccgtccgggttccaggcttcggcagcatccagcgacttgagttcagacggcgtgaccgggaacagcgccaaggccggaatccccaattcaacccaacccgcggcctcttcaagcagcagatcaatgctcaaacgctccacgcccggcatcgaagccaccgcttcccgacggttttccccgtccagcacaaacaccggcaggatcagatcgtcggtcgtcagcacgttttcacgcaccagacggcgagaaaaatcatcacgacgattgcgacgcagacgggtggcggggaacaggcgattggcaggggtaaagctcacgacagactcctgagcccgggtttacgggcgagcgttgcagttataagcggccattatgacgaaggtatgacagttgtgcttaaggatgcgacctgtagtcgcattcggcatttctgtaggaattgttcacttcgtgacacatctcgatactttcatgaatcttcatgaaggcgtaggctgcgcgttcatttcgccagcaccccagaccatgcttcaacaattcctgcatgacttcggctactttgcgctcttcctgggcaccttctttgaaggcgagaccattctggttctcgcgggcttcctggcgttccgtggatacatggatatcaacctggtggtggtcgttgcctttttcggcagctacgccggcgatcagctttggtattacatgggccgcagacacggccgcaagctgttggcgcgcaagccacgctggcaattgatgggcgacaaggccctggagcacatccgcaagcacccggatatctgggtactgagctttcgcttcgtatacgggttgcgcaccgtcatgcccgtggcgatcggcctgtccggctacccgccgttgcgctacctgatcctcaacggcattggcgctgcgatctgggctttggctttgggcgctgcggcctatcacttcggcgcggtgctggaaggtatgttgggcagcatcaagaaatacgagctgtgggtattgggtgccttactgatactgggcttcggcctgtggctgcgccgccgcatcaagaatgcgcgcattgcccgtgaagcctgtgccgacgccaaggcccggctcgcggcagagccggtcccggtcgagccgcctaagacgccagtcgagtaagccggcttctgcagcagtagaggccaatcacactcagcaagctatagctcagcaggcccagccagcccaggttgctggccggccataacccgaccaacggtgccagccacaccagcggcacattcagcaccagccgcgaaagctcggccttccacgcccacggccggttctccagcgccactcctaaggtaaacaggcccagtgccatggcactccaacccaggatcagtgccgccgtgggcataccctcgccaaaattcatcagatagctgccaaagcccacatacgccgcaaattgcagggcgatatagacctgttgacgcacatccagcgacacgtcgaatttacggaactggctcaggtcatgcttgaccatcgggtacttggccttcacgtccgccgggcgccagccggtgcgcatgaaccagatgcgcagcttgtcccaccagcgctcggtgcgccgcgcatcactccacaactgggcatagaactgcaggttggcccacagcgggttccaactggccaacggtgtggtcacgccgaaaatcaccggttcgttgtcgtcttcctcctggaaggtgccgaacagccggtcccaaataatgaacacaccgccgtagttacgatccatgtagagagcgttctgcgcatggtgagcccgatgattggatggcgtgacaaaaaaccactcgtaccagccgagcttcggcacgtgccgggtgtgcacccagaattgatagagcaaattaagcgatgccacgctgataaataccaccaatggcacgccgagtacggccaggggcaggtagaaaatccagctcagcaggaagccggtactggtttggcgcaaggctgtgctgaggttgtagtcctcactctggtgatgcaccgagtgcgcggcccacaggatgttgcgttcatggcccatgcgatgcagccagtaatagcagaagtcgtagaacacgaaagcgaacacccaggtccagacgctctgggcaggcagttcgatgacggcgagatgcttgagggcgaacgcgtaggtcaaaatccccacgcctttggtcagcagccccgtggtggtggacagcaccccggtgctgaggctgttgatagcatccgccacccggtagttgcgctggccgcgccagcgatcggcgagcagctctaccacgatcaaggcgatgaaaaacggtaccgcgtaaggcacgaagtccatggtctggtccggtctatttttgttacatcaagattaggtgcagcggcgtgagatcccattggcaacagatgacaaattagtagacatttaacgccaagaccccaggagaaatgcccatgagcaaaaagattgcagtgatcctttccggctgcggcgtgtacgacggcgcagagatccacgaaagcgtgatcaccctgctgcgcctggaccagcgtggcgctcaggtccaatgctttgccccggatattgcgcaactgcatgtgatcaaccacctcaccggcgaagagatgcccgagtctcgcaacgtgctggtggagtcggcgcggatcgcccggggtgacgtgaaagatatccgcgaagccaacgccggcgacttcgatgcgctgatcgtgcccggtgggtttggcgcggcgaaaaacctctcgaactttgccgtggagggtgctggctgcagcgtcaacccgcaggtgctggaactggccgaagcctttgccgaagcgggcaagccggtggggctgatctgcatctcaccggccctggcggctaagatctacggccccggcgtgacctgcaccatcggcaactgcgccgacaccgctgccgcactggacaagatgggcgctacgcaccaggaatgcggggtggaagatatcgtcgaagacaaggcgcgcaaactggtgagcaccccggcctatatgctcggcaagaacatcagcgaagtcgcttcggggatcaacaaactggtggatcgggtgctggaactgactcacgagaacgactgatagcccccaactgtggcaaatcgccagttgtggtgagcgggcttgttgtggtgagcgggcttgccccgcgnnnnnnnnnnnnnnnnnnnnnnnnnnnnnnnnnnnnnnnnnnnnnnnnnnnnnnnnnnnnnnnnnnnnnnnnnnnnnnnnnnnnnncgcggggcaagcccgctcaccacaacaagcccgctcgccacaagaaaccggatcaccatagggtcaagccggacgcatcaactttgtgagaatgcggtccagcgcattggcaaacgcctgcttttccttctccccatggggcggtggcccgccgcccatctggccttgctcacgcagatcagtgaacagattgcgcacggccaaccgttcactcatgttcgccgggctgaactccttgccgcggggatcaagcgccgtgacgcccttcttcaccaggcggtcggccagcggcacatcgctgcagatcaccagctccccgggcaccgcgtgctccaccaggtagtcatccgccgcatccgggccgctgggcaccacaatcagcttcacacacgagaagctcggcttgatctgactctgaccggccaccagcaccacctcgaactggcgcttgagggcgaacctcaccacctggtccttggctgccctaggacaggcgtcggcatcgatccacacccgcatgctcaggcaaccacccggcgcttttcggccaggcggctgcggccatacagcaccacaatcgccaggatcgccaccgcctgtgcactcaacgagtacgcatcggcgtggatacccagccagtcaaagtcaaagaacgccaccggccgggtgccgaagatgccggcttcctgcagcgccttcacgccatgcccggcaaacaccaccgacagcgcacacagcaacgccgcgttgatgccgaagaacaacgccagcggcagcttcgccgaaccccgcagaatcacccacgccaggcccaccaacagcaccagcgctgtggcgccccccgccagcaccgcgttgtgcccggccgggccggcttgcagccacagggtttcgtagaacaggatcacttcgaacagctcgcggtacaccgagaagaacgccagcaccgcaaaaccgaagcgcccaccgccgcctaccaggctgctcttgatgtagtcctgccaggcggcggcgtggcggcggtcatgcatccacacgccgagccacagcaccatcacactggcaaacagcgctgtgcagccttcaagcaattcacgctgggcgccgctcacgtcgatcacatacgcggccaatgcccaggtcgccaggcccgccagcagcgccagaccccagccgacgttgacgctacgcaccgccgattgctggccggtattgcgcaggaacgcaaggatcgctgccagcaccaggatcgcttccagaccttcacgcagcaggatcagcaacccggagatgtagctcaacgaccagctcaagccatcaccgccgagcaggccggcggattcagtgagcttgcccttggcgacgtccaggcgttgctgcacctgttcaaccggcaaaccgtcctgcaacgactgccggtaggccatcaacgccttctcggtgtccttgcgcacgttggcgtcgacgttatccagcgagctttctaccagctcgaaaccttccaggtacgcagccacggacaggtcgtaggcctgctcatgatcacccttctggaacgccgccaggctcttgtccagggtggcagcggtgtagtcgagcaactgcgccgggccacgcttgacctgcggcggttgcgcacgctgggcgcggaacgtcgcggcggcggctgggccgttggcagccagcacttcattgggggtctggcgggccaggtcggcaaggttgaacggttgctcgctttttgcagccaccgggtcggcagtaaagccggcgatgtaggtggccaggtcccagcgctggcggtcgtccaactggtcggcgaaagacggcatgtcggtgccttcaacaccgaggcccagggtgttgtagatcgcgtagaggctcaggcgatccaggcgcacggcgtcacgcagattggccggtggtggcgtcatgcccacgctggccgggccgtcacccgcgccagcggtgccgtggcacaccgagcaatgctgggcatagagcggcgcgcctcgcgttggatcaggggtgatcgccggggcctgactgacttcataggccacggctagttgggcacctaactgacgggcttggcgggcgactgtcgtaccgtcctgatgggcggttacggctgctaacaattcgtcgacgcctttgaccagcgccacgcgttccgggcgctgcggcagctctgccaccagcccctgcaataccccgagaaactccagctgttcgcggtattcggattcatcgataaccttgcccgcctccaccgtcgctgggtagtcagcgccaatgtaatccagcaaatgcagggcttggggcgcgccctcggccgtcgcggccaacaggttgacgctgcacgacatcaacgccggcaatatcagccaggcgagaaaacgaaggggggcaatcatgaacgaatctcaaagggaaatacgaagtaacacattgttaagccttaaagggtttgactcaaggcgtaagtgatttgtcgttgtttgaggcgaggcattttcaggagcggactagtggcgcttttgtcgacttagtcgggcaaaaagccattgttttgccagcaatgacgcttataatgccgcgccctgttagtgcgaaagggaatttcattcctgttttttataaggaatgaccacatcagttgatactttcagggaagaagtctgcatggcatttcgcgccttaccttcgctcgcgctcgtggcggtgaccttgctgtccggttgttcgatgttccgcagctacgacacggaactgcaagccaccaaccagcaactggccaccggcaatgtcgatgcagccctgacactgctggaaaagaacaacaccggcgacgacaaggacttgctctatttcttcgagaagggcgagttgctgcgtgccaagggtgatttgaccggcagccagaccgcctggcgcagcgccgacctgcaagtctacaagtgggaagagtcggtcaagttcgacagcgcaaaatacctcgcccagttcggcagtttcctggccaacgacaaggtgcgtcgctacgaaggctatgactacgaaaaggtcatgctgaccacccagatggcgctgaacctgctggccctgaacgacttcgacggtgcgcgcaccgaaatcaagaagacccacgaacgcgaagcggtgatcgccgacctgcgcgacaaggaatacctcaagcgtgaggacgaagcccagcgcgaaggcgtaaccacccagatgaaagacctgcgcggctacccagtagaagccctcgacgcaccggaagtggtcggcctgaaaaacagctaccagagtgcgttcagccattacctggcgggcttcgtctatgaagcactgggcgaaaaagacctggccgcgcccggctatcgcaaggctgccgaattacgccccaataccccgctgctggaacaggccctgctggacctggacaaatccagggtcggcgccgatgaaaccgacgtgctgatcgtggtgcaaagcggcctggcaccggcccgcgactcgattcgtctgccgctgccgatcccgatcaatggcaacctggtgatcaccccgctgtcgttcccggtgatcaaggcagatacatccaccgccacgtttgcccagatcggcgtcgacggccagcaacagaacctcaccgcactcaacagcaccacggccatgtctcgccgcgccctgcgcgatgacatgccagggatcatcctgcgcaccaccgtgcgggcggtcacccgtggcgtggcgcagaacaacctgaacaagaccaacccgatggccggcctggtgctgggtattgcttcggccgtcaccgaaggtgccgacacccgcacctggcgcaccctgccggacatgacccaggtgacccgcctgcgcctcaagcacggcgagcaccaggtcagcctgcccaacgccctgggtggcacgctggtgacggtcaaggccgaccagcgctatcaggtgatcaccctgcgcgtggtcggcaaccaggtattcgccggtggcctggccgcccatgtggtgccgagcaccgccgcccaggccatcgccctcaaacaaccttaaggagcacgctatgcgtcatttcatcctcggcgccctggcgctagtcctgctggccggctgcgccaccccgccaccgccggaacccggcagcgccgcgagcaaaatcgtggtgatgggcaagttcaagggcatcgccgtcggcgccatccgtgtggcccgcgagaacggcttcctgaccgccaaggtgcagttgagcaacatcaccagcagcaaccagatgatgtactaccgctttgcctggctgggtgccgatggcttcccggtgggcgatgaagaaacctggaaagtgctgaacctgtacgccaaccaggcgaccttcctgccggcgattgccaatttgccgcaggcggcggacttccgtcttgaagtgaaaaccccttgagccgtccttctttgctgctgagagatttccccatgtttgcacgcttctcgatccttgccgtcgtcgccatcctggccagcggttgctccaacacttcgccggtactgggcggtaagaacatcagctacggcgataccaaggccgtggaactggtgaccaacgagttcggctccaccgacctgcagatgatcgccgaaagcatgacccgctccctggcccagtccggcatcctgcaaggccgcccggtggtgcaggtgtatgacgtgaagaacaagaccagcgagtacatcgatacccgcgagatcaccacgtcgatcaagacccagctgatgaagaccggcaccgcacgcttcgccagcgacaacaccgacatgcagagccaggtcgaccagctcaagctgcagaaccagagcggcctgtacaagaagtccaccgtcagcaagaccggcaacatggtcgccgccaagtaccgcctggaaggctccatcagctccatcgtcaagcgcagctcggactacaaggacgtgttctacaaattcagcctgcaactgatcgacgtcgagagcggcctggccgaatggatggacgaaaaagaaatccgcaagaccacggagcgctaagcaatgcgtgcatggatcggcatgatcggcctgctgtgcgccttcggcgcctcggccgccccgaagatcgcggtgactgacctggcctacgaggcgcgggtcgaggaatacattcaccaggtgtcggcaagcaacaacttccaggccagcgcctaccacgccagcggtacgtcgaactacagcgagtacgaaagccgcaccagctacatcgaacagaccgagctgcgtaaattcagcggggatatcaagggcgagatcctcaagtcccaccagttccagctggtacagggcacgccctacaccgccgatgccaagggtgacgtctacgacgtgatcaagcgcatcaaggccggccacttcaagggtgcggactatgtgctgtttggcacgctgtcggatatcgacttcacccaggacatcaacgccctggaccagaccaacagctactcggcggtgctgggcctgacgctggtggcggatttcagcctgatcaatacacgcacctacgagatcacctcggcgttcaccgccatgggtgaaggtcaggacaccaagttggtgaacaaccgcgatgtacgcgtcagcctgaaccggccgcgggtggtgaaggaagtgtcgaaagcgctgggtgaagatgtagcgcggcagttggcagagcaactgggtggtgggtatcaagacccgggcaagcctgcgttgcgcaataacctgccaagggatgaagcgccgaaaattttgcgctgacgccctattcacaaacaccgcaaaactattgtgggagggggcttgcccccgatagcggtgggtcaactacaagttagctgactgacacaccgccatcgggggcaagccccctcccccattttttaatccggttgtgtcagttatgccgtggcacggtgcaggctggcgaggaagcccgcagccccaacgaacaaccccgcaaacgtacgattcatccgcttctgctgcttaggcgtacgcaacagacgcaacaccttcgacgccagccccgtataccccgccatcaccaccatatcgacacagatcatcgtcgcacccaggatcaggtactggatcagcagcggcgcctgcgggttcacgaactgcggcagcaccgccagcatgaacaccagggccttggggttgctggcgttgaccaggaagccacggaacatcatcgccatcggcttgccgatcgggcgcacggccgcgtcatcggtcatgtccatgggcaaggcacgccattgcttgatggccaggtacaccaggtacgccacgccaaaccatttgatcgcatagaacgccgtggacgacgtcgccagaatggcacccaggccgcacgcgaccacggcaatctgcattgccaggcccagttgcaggccgatggcattccagtaaccgcgcaggaaaccgtattgcaggccgctggacatcgaggcgatggcgccagcgccaggggaaagggagatgatccaactggccaggaaaaaggccagccacgtatcgagtgccattacacacctcaggagggagtttgctgttgtgccttaagctaactccgccgaccaaaggatggctatagatttttacaggatgtgaatgctagcggtcgcccggaaagacatgggtacccggccaacggcgcaccgagcgctggaagaacaggctgttaggcacctgcaccatcgcgctgtcggtaccggcctcggccacttcgaccagcgtggtgtagagcaggttgatcgccacgacccggcccttcacgcccggtttgtcgacggtgtccaccagttcgacgatatcacccaggcggaacggcccgacggtgaagatcagaatggcgcagagcaggttggacaacaccgaccacatggcgaagaacgccaccgcggcgaccgcaacaaaccccgacagcgccgtccacaacaccgtggcggacacgcccaggcgccccagcacaaagatcagcgcactgcccatgatcaaccagcgcaagccgccacgcagcggcatcagcagttgcggtgggaacgggtagcgctcgcccaggcgagtcaggcctttggcgacaaagcgctgggcgaggtagccggccagcaggatcagcaggatttgcacgccgacccatacgggttcgacccactgcgtcgggatcggcagttgcaacgcttccatcaggacagcgcctccagctgcgcttgcagggtttccagcagttcgagggcttccatccaggtttcctccaattgcccttcgcgtaccttgagcttggcctgctcagccagcaggtcgcgcaattcatccttgcgggccgcctcgtagacggcgctgtcgcccaggctggcttcgatcttggccaggcgctcgtgcaccttgcccagctcggcttccagcttgtcggcttcacgcttgtgcggcgccaactgctgacgcaatgcggcggcagcctggcgctgggctttcttgtcggtcttgtccgggttgaccggggtgttgctgaccggcgcgttgcgcaggcggtaatccgtcagccagcgcgcgtagtcatccaggtcgccgtcgaactcttcgactttaccgtcagccaccagcaggaagttatccgtggtgctcttgagcaaatggcgatcgtgagataccaccaataccgcaccactgaattcctgcaaggccatggtcaacgccagacgcatttccaggtcgaggtggttggtcggttcgtcgagcagcagcaggttcggacggtcccaggcgatcaacgccagggccaggcgggctttttcgccgccggagaagttcagcaccggctcgtcgatacgcgcgccacggaagtcgaaaccaccgaggaagtcgcgcagggtctgttcgcgctcggtcggcgccaggcgctgcaggtgcagcaacgggctggccttggagtccagcgagtccagctgatgctgggcgaagtaacccaccaccgtgttctcgccacgggtcaggcgcccagccagtggcgacagctcgcccgacaggttcttgatcagcgtcgacttgcccgcgccgttggggccgagcaagccgatacgtgcacccggcgttagctgcagcttcactttttccaggatggtcttgtcgccatagcccaggcgcgcatcggaaagatccagcaacgggctggagatcttcaccgactcacggaacacgaaatcgaacggtgagtcgacgtgggccgccgacagctcttccatgcgctcaagggccttgatccggctctgggcctggcgggccttggtggcctgggccttgaatcgggcgatgtagctttccatgtgcgcacgttgcgcctgctgcttctcgtaggcctgttgttgctgggccaggcgttcggcgcgggcgcgttcgaacgcggtgtagccgccacggtagagggtgattttcttctgttcgacgtgggcgatgttatcgaccacggcgtcgaggaaatcccggtcgtgggaaatcagcagcaaagtaccctgatagttcttgaggaagtcttccagccacaggatcgcatcgaggtccaagtggttggtcggttcgtcgagcagcaacaggtcagacgggcacatcaacgcttgagccaggttcaggcgcatgcgccagccgccggagaagtcggcgaccgggcggtccatctgttcgttggtaaagcccaggccggcgagcattttgcgcgcgcgggcgtcagccgtgtagccgtcggcgctgtcgagttccgagtgcaggcgcgcctgtgcggcgccgtcctgggctttctcggcctcggccaggtcgtgttgcacctgacgcaggcgcaggtcgccgtcgagcacgtagtcgatcgcgatgcggtccagggtgtcgatctcctggcgcatatgggcgatgcgccagtcggccggcagcaagcagtccccggaatccggggtcagctcacccagcaacagggcgaacaacgtggatttgccggcgccgttggcaccgatcaggccggctttgtgaccggcgtgcagggtcagctcggcgtcttcgagaagacgttgcgggccacgctgtaatgttaggctttgaagtcggatcataatggcggcggagtctaccagcttcgttggccgctggcttgggtgtgaatatgtgcgctgacctgtggagctttgccctttcgacttacgcccgctcagggtgcgaggccgcttgcctgcgcttgcaggagcaaggtgcggacgtgtgcctgctgctgtgtggtgcgtggctggagcagcgcgcggtgacagcgaccgctgaacgtatgcaggcactcaaacaaatcgccagaccctggcaggcacaggtgattgcaccgttacgacaggtgcgcatgcaatggcgcgccatggcgcagcaggatgaggatatggcggggttacgcgaacgggtcaaggccctggagctggacgccgaacggcagttgctggcacgcctggaagcgttggcacaaacgtggccgactggcgatgcgggggaccggctagggtggctggaaggactggcggctgaggatgccgccaaccttgaccacgacgcgctgcatcagctgcgcgtcgtggccaccagcacttaggaagcgctggttggagtggcgcttggcgctaccggggcaggcgtgctgctggccggagcagttggagcggtggatgcagccggggcggcagcaggagttgctggcttggcagcagccggtttggcggctggcttagcggctggtttcgcagcagcaggtttagccgctggcttagcggctggtttcgcagcagcaggtttagccgctggcttggcggctggttttgcagcaacaggtttagccgctggcttggcggctggtttcgcagcagcaggtttagccgctggcttggcggctggtttcgcagcaacagttttagcaactggcttggcggctggctttgcagcagcggttttagcagctggcttggcggctggctttgcagcagcggttttagcagctggcttggcggctggtttcgcagcagcaggtttagccgctggcttggcggctggtttcgcagcagcggttttagcaactggcttggcagctggttttgcagcagcggttttagcagctggcttggcggctggttttgcagcagcggttttagcagctggcttggcggctggttttgcagcagcggttttagcagctggcttggcggctggctttgcagcagcaggttttgctacggctttagcgggtgccttggcagcaacagctttgctcgccggcttcttcgccgcgctcgctgcaacagctttggctggggtgcgagcgcccaacaccttagccacggcttccttcacacgaccaacgccctgggccagtttcaggctttcctgagcatcttttttcagttgggaaatgtaggcgcgggtttcagcttggcgatccttgagggcgtccagcagatcctcaagttctttgacagcgtctttggctttggcttgtgccttggccttgccggcagtagcggcgtcttgcagtttggtgcgggatttgtgcagcttttcttgcgctttaccgcgttgtttttccagcttggcgagcagtttttctgcatctgccaacgcttgggaacaggcgctttccagatgttcgagcaagctgcccgagagttgttggagtaaatgcaacggggtattaacaggcttctgtttggccgacatggtttacctcctggctgacgtgggtgcggctcatactagccctctgctcttaccgccgctagggcatgttgacagtatcgtttgccttgcgttgcaccgtgagaaaattcttatcgatataacgaaaatacgcggcacttttgacgtcaccacactggcataatccgttgcactttcggcgggaggatgcccatgtcgcgttacctttttcttgtgctcggcctggcaatttcggtggccaatgcgagcgaacaatcgccggtaaaaaaccctgggcagaaccagcacgacctcgcctacagcctgggcgccagcctcggtgaacgcttgcgccaggaggttcccgacctgcagatccaggcgctgatcgacggcctcaagcaagcctatcaaggcaaacccctggcgctggacaacgcacgcatcgaacagattctggcccagcacgaagcacaaaacgaagctgatgcgcaggcacctcaaagcgaaaaagcgctcgcggccgaacaacaattcctgagcaaagaaaaagccgcaaaaggtgtgcgcgaattggcggatggcgtcctgctcaccgaactcaccccaggcactggcgacaagccgagggccagcgaccaggttcaagtgaagtacgtgggacggctacccgatgggacagtgttcgaccagagcgcgcaacctcaatggtttcgcctggacagtgtgatcagcggttggagcagcgcgttgcaacagatgccggtgggcgccaaatggcgcctggtgattccatcagcccaggcctatggcgccgacggtgccggcgaattgattccgccctatacacccctggtgttcgagatcgaattgctcggtacccgacactgaggcaataaaaaacggtgcgccatgcgcaccgtttttttgtaccgccgtcgtggatcaagcttgagtagcagactcttccttgtgggcgttgtgcagcacttcgatcaagcagtcttcgagttcgaatcgctcgtgaagcaacgcgcccaattctttgaatttatccgccacgcagttaccggcatcacacaggtcggtgaactccagcagcttctcggtgatgacatcgatacgcgggtagatggtctccgccaagtccaggccacgctgatcgtcgaaggcctccgcctccttggtcagttgctcgtagacaccgaaatggccggctgacacgtagtcaaccaacacaccacaaaagtcctgcaacggttcacggttctcggccagtgcttcaggcttggcgccaagagcatcaaaggcccgaaccagttcgtgacgtgccttcaaccagctgtcgatcagcttgtgcaccccaccccagcgttcctgagcattctgacaactttccagcatgatgatctctcttccctaataggggcgctgccgcctggtgcccgcgcaacacttcaaggataaagcagcagccggacaaggccgcatctgacaaacggtttcaacaacacgtgcgggccagattatgcccgcatgactatggcttcaaggtacgcaggagagaaagttcatacaagtgtttaatcccgccctacaaactgcgacccgatatcagcgcctcgccagacgcaaacgttggctcaaaaacagctgtgaaaattgcatgacgcccagtatcaacatcccaatgaagaacagcaggctccactccggcaggctcaagtcaaacagcgtccagttgatctcaacgcagtcgacggtgcctttgacagtcaattgcagagcctgccaaaacgacaggttttcgatcatgtaatgcaggctgggccagcaatcagccgactgtcccggtgcggcgttttgcagcagtacttggcgtatggcggtaatggcacccagcagtgcgaagcccatgctcgccagcccatacaggtagataaccaagcgcttggggtgatggagggcggcgaccagattgaccaatgtgaaaccggccaggaaaccccgttgcatctggcacagaaagcaaggacgcaacgagaccccgaactcgaggtaaaacgaggcgcccaatgtcagcgcacccgccaggaacgcaaggacatacaaggagcgtgaaggggccaaagacatgctttatccgcatcgcgaaagataggtcgctacggtagaggaaaggcctgaccgctttcaatacatgctggagcagacgattccgcgagagagtaaggagatcccgccagaagatggaagactttggacaacagagtgtcggactttgcccacaatcgcgctgatagccgctttctgaggtcctgagggattggctgccagaactatccgagccaaccctcgcctgtcttcctacctcaaacccgcgccgggacgggcagcggtgaagccagcaaacggttatccagcaaccccagcccttcctggaacaattggttactgcgctcggtgtcacccagttgggccaacaagcgcgccagctcggcgcaggcctcagggttgcgctgcacctgcaggctgctttccagataatcccgcgccttgccccacaaactgttttgcaggcacagacggcccaacgtcagcagcaggctggcatcgccaggatgatccttcagccaaccttcggcaaacttcagctgccgagccggatcgctgccacgcaacagaccgtacagccggatcaggtggctgtcgtaaccacgcttgatcgcgccacgcaatgcttcctcagccttggcgtcggcacccagttggcgcaattgctcggcgtaagccaggaccaattgcggctcctgacgctgtgcggaggtgagttgttgccaagcccgttcaagggactgcaagccggcctcgccctgttcttcgcgttgggctgcaaggctgaggttctcgccccacgcacgacgctcaagctcggccagttcactggcgggcaagactttatccttgcgcaattccggcaacaggcggatcaccgatgaccagtcgccccgctgctgatgcaagcgctgcaattggcgcagcacctgcgcattatggggatggcgctcgtgcatcgcttgcaaggtggtcagcgcaccctctgtatcaccacggtccagttgcagctgggcatggctcaaggcaaccgccagctcggcctggggctgacgctccagggcacgctccagcaaaccatcagactcttcgtagcgcccctgttcattggcagcacgggctgcgccgaggtagtacagcagcggctgacgctcggcttcggcagcgcggtgcaggtgacgctcggcgctggcccagcggccttcggcgaggtccatctggcctagttcgatggcgatctgcacgcggcggctgcggttgcgccgtgaccacgggttgaccacgccaccggaagtggtgaccaggctcagcagcacgcggatcagatagatcgtcaaacccatggcaaacaccgccaccacggtcgcccacaggctcgactcgtaatgcagcacgtgcggataggtgaccagcacgtagccagtgtgtttcgaaatgcccaccgccagcgccagcgcgatggcaatcgccagcaccaggatcacatagaaacgtttcatcggctctactcctgcttcgccggcgtcgccgccgccttggcttcgtcggcagacagatgacgccgctcaaggtacgcctgcacagccgccaggctcgcagccaggtccggcgtcactaccgacaccgccttgggctcaagctcggcgatacgtgccagcatcgccttgctctgcgggttgtcctggttgaagttgtcctgcaagacgctgcgcgcttcgcccaaggagcggctgtagaccgccgactcaccattgagcgcagcccattgtgcttgctccagggccaggctcagggccaggcgcacctggttcaagccttggccggccagcagcggacgaatgttgtcgtccgggttgaagtcgatgcggaagtagcgggaaatctgctcccaccattggctccagcggctttcggtgtccgaggtcgggcgtccttgggaagccggctcggtcaactgatattcaggggcgatggccgccaactgcacgacctggtcgcgcaaggccgccagttgcaggtacagcccggtgcggtccggctggtcggtgctgcgcagcgcggcaaggctcttagccaattgttcgcgggcagcgtaggagccagggtcgctttgttcgcgaagaatctcgtcggcaccctgcaccaatgcctgggcgctgttgatatcttgaagggcagaaaggcgcaggctcgccaggcgaatcaagtgttcggcctcggccaggcgccagtccttacggctggcgcccagcacggtttccaggcgctggctcaggcgttgctggtcgccctgcaactgggccaccaggcgacggcgctcctccagctcatccgcacctggcaactgcgccaggcgcgccgccagttgttgctggctttgcttgagggactgggactggtcatcgagggtctgcacctggcccaactgctgttggctgctggcctgcagggcgcggacctgccaaatcccccaaccgccggcggcaacaccggcggcgccgagcagcagggcgatgattgccaggccattgccacggcgcggcgcggtgaccggtgactcaaccggcgcatcaagcgcgggctgggcttcatctttaggcaaggctgtttcgctcacgtatccgtcctttgcgtttcagagagtgggaacggtatagctccgtatcgccactaacaaagccgcggcactcgcaccacgacaatccacaactttttctgcaccggcggcccgcgccatctcctggactcgcgggctcggcacgaacaacggtagctgtgccacttggggccaatcggctccggccagggcttgcaggtgtaaaaaaccctgcccactgctgaccaccaggccgttcaagcgttccaactggatgcgttgcatcagtaccccggcgtcgtaggccggcaggaaacggcgatacaactccaggtagtcgacactagcaccttgctcacgcaaacgctccgccagcagctcacgccccccctcgcctcgcaggatcaagacctgggcatcagggcgtgcgatagcctcgcgcaacgcaggcaattgaagcaaggcctcgctgtcgtcgccagtggggggatagtgaacgttgaggccgtgatcagccaatacctgcgcggtggcggcgccgacactgaaccatggcaactgcggccatgcgcgatccagctgcgcgaccgcaagtcgcgccgccggcttgcttactacgatcaccgcgcagtagcggctcaggtcatggaagacagcctgctgttcaggagtgacaggcagcggttcaatatccagcaacggcaagctgctgctgaaaacccccgcatcggacaacgtggccgccagggccatcgattcctcggcaggccgcgtcagcagcacacgccattcggtcactgcgggccggcctcgccgtagactttttgcagaatggcaccggcgcccttctccagcagcgcttcagccacctggataccgagggccgtggcatcccgttgcgggccacggacctcggcggccagcagggtgccgccttccggatcacccaccaggccacgcaaccacaggttttcaccttcgagcacggcgtagcaggcgatcggcacctggcaaccaccattaaggtgcttgttcagggcgcgctcggccgtgacgcgcacttcggtatcgtggtgatcgaggggtttgagcagggtatggatttcgctgtcggcggtgcggcattcgatacccacggcgccttgtccaccagcgggaaggctatcctcgacgctaatggctgaggtgatacggtcttcaaagcccaggcggatcaagccggcggcggcgagaatgatcgcgtcatattcaccggcgtccagcttcgccaggcgggtgttgacgttgccgcgcaggaagcgaatctgcaggtccgggcggcgagtcagcagctgtgcctggcggcgcaggctcgacgtaccgacgatgctgcccaggggcaactcatccaacgatgcatacgtgttggaaacgaaggcgtcacgcgggtcttcacgctcacagatgcaaaacaggcccaggccttcgggaaagtccatgggtacgtctttcatcgaatgcacggcgatgtcggcttcattttccagcagcgcggtttccagttccttgacgaacaggcccttgccgccgatcttcgacagtggcgagtcgagcagcttgtcgccgcgactgaccatgggcaccagggacaccttcaggccagggtgggcctgctccaggcgtgctttgacgtattcggcctgccacaaggccagggcgcttttacgggtggcgatgcggatttcgcgagaggacatggatcaatccgtactgaatagatacggcagataataacagctcaggcaaatacgctttgatttgaatcagcaagtgcggggcctccctggccacgtcgcaccgggatatggaatgcaggcctcgctacagcccgtgggctaaagctgctgcatcatcttgcgcacaccggccacatgccgtcggctgacgatcaacgcgtcgccgttaaggcctttgaggaatagctggaaatgccccaggggcgtgcgctgcaaccgttcgatgcgctcacgggccaccagcgcgttgcggtggatacgcacgaagcggtcgccgaattcatcctcaagcgccttgagcggttcatcgagcaacacttcgccgccctggtgacgcagcgtcacgtacttgtgatcggcaataaaatagaccacttcacccagcgggataagttcgatgcctttgcgggtacgggcgctgatatgactgcgtggcccgttaccactttgggcggcaggctgagtcagggcggcaagctggacgcgcgttgggcgctcagcctttttgagggccttgagcaaggcgtcacccaccaccggtttggtgaggaagctgacaccgctggcttccagcgtttccgcggaaaactcttcaccggctgcgcaaaacaccacggcaggtggcgactctcgttcgctcaatcgagccgcaacttgcaagccatcgaggcccggcatacggatatcgagcaacaccacatccggcttgaggctgtcgatcagcgtcaacgcctcttcgcccgtggtggcgctcggttctaatactgcgtaaccctcgagctcactgaccagacggctcagtcgctcgcgggcttggggttcgtcatcaacgatcaggacattcatattgcgctggattcctgcgtgagtctcgcacaaggatagcgtagacaggtgcggtgacttgcgtcacagcgatccacgctaagactagcgcgagcggcaaaaagtgccctgagagtggcacccatatttacccggacctgttcaatagcgcccaagacctgctgccttcgggcatcgtcgtagggtttgctgatacacaatccgaatacccccctttttttaatggatagtctgggctctgaccgcattacccgactttggtgcattcacacactatcagtccaactgtagacgctcgctgagacgacattgctcaatcgtcaaatatcgtttcaataaagccccttcgctcagtctcgtcctggacgcggtcggcggcaaggcacttagccatcctttgcacaaataaaaatgccgacgacccgcggcaccgcgtccacgggcaaccctgttattatcgccggcacacttccatgcctcttattaagcagatcacgagcgaatccatgagcaccgacaagaccaaccagtcctggggcggccgcttcagtgaacccgtcgacgccttcgtcgcccgcttcaccgcctccgtcaccttcgaccagcgcctgtaccgccacgacatcatgggctccatcgcccacgcgacgatgctggccaaggtcggcgtgctgaccgatgccgagcgcgatagcatcatcgacggcctgaccaccatccgtggcgagatcgaagccggcacgttcgactggcgcgtcgacctggaagacgtgcacatgaacatcgaggcccgcctcaccgaccgcatcggtgtgaccggcaaaaagctgcacaccggccgtagccgtaatgaccaggtggccaccgatatccgcctgtggttgcgtgacgagatcgacctgatcctgtccgaaatcacccgcctgcagaaaggtttgctggagcaggccgagcgtgaatcggacaccatcatgccgggcttcactcacctgcagaccgcgcaaccggtgaccttcggccaccatctgctggcctggttcgaaatgctcagccgcgactacgagcgcctggtggactgccgcaagcgtgccaaccgcatgcctctgggcagcgccgctctggccggcaccacttacccgatcgaccgcgagtacaccgcacaattgctgggcttcgacgccgttggcggcaactcgctggacggcgtgtcggaccgtgacttcgccatcgaattctgtgccgccgccagtattgcgatgatgcacctgtcgcgcttctccgaagagctggtgctgtggaccagcgcgcaattccagttcatcgacctgccggaccgcttctgcaccggcagctcgatcatgccgcaaaagaaaaaccccgacgtgcccgaactggtgcgtggcaagagcggccgcgtgttcggcgccttgatgggcctgctgaccctgatgaaaggtcaacccctggcctacaacaaggacaaccaggaagacaaggagccgctgttcgacgccgccgacaccctgcgagactcgctgcgcgcgtttgccgacatgatcccggcgatcaagcccaagcacgcgatcatgcgtgaagcggcgctgcgcgggttctctaccgcaaccgacctggcggactatctggtgcgccgtggcctgccgttccgcgattgccacgaaatcgtcggccatgctgtgaagtacggcgtggacaccggcaaggacctggcggaaatgagcctggaggaactgcgccagttcagcgaccagatcgaacaggacgtgtttgccgtgctgaccctggaaggttcggtgaatgctcgtaaccacgtgggcgggactgcgccggcgcaggtcaaggcagccgtcgtacgcggccaggctttactgtctagccgctgaaaaatgtgggagggggcttgcccccgatagcggtgggccagccagcacatgtgttgcctgacactctgctatcgggggcaagccccctcccacacttgatcactttttggctgcgatcatcgccacaaacgccggcatcgccgcctccctgtccgccgccaccttctgtgcgttgggcatggcatgcaaccgctccagcaacgccttggccgccggcatgtcagccagaaaatccaggccaaacagcttctcgcccaccgcacaggcgaggttcacgctgtacatgaagtacaaatccgcaatcgtgaagctttcccccgccacatacggcgcgaacttgccgtgcctgctcagcgcaccgacccccagtagcaactcggacctggacttctccttgatcgcctccggcaccggcatgcccataaacgcttcggcgtaacacgcgcgggccggcagctcgatgtacaactcgatctccctgcacagcgccagcacctgggctcgctggaacggctcggcgggcagcagcgaaggcccttcctgggtctgttcgatgtattcgaggatcacgctggtttcgttgataaacccctgcttgacgccgaggaccggcaccttgccacgtgggctgaccgcaaagacatcgggggtctgcccggagaaaaaaggcacctcttcgaaaggcagccctttctccagcagcgccagcttgaccatgttgtagtagttactgaccgaaaatccgtagagcttgagcattgcaggtgcctccaggccgggaatggggttggctgcaagggttatagccccgagggcccggccttgccagcagcatcagccgcctgaatgggggtagactggcgccctttccttgaggagcctgccatgagcgagcctaccgatatcgacaacgacgaagaagaattcgccgaaaccaccctgatcgaagcgatcgaaaaccagatcgaaagcgaaaacccaccggcggccaaagccacgttcaacaagctgaccctggtgggttacgaacgtgaagagattctgcaactgatggcccacgtgctggctgtcgaaatcgatgcgctgctggaagaagaccgcgccttcaataccgaatggtatgaaactgcactgcgcgccctgccagaactgcctccggaaaagcaataatccaggggcgcagcaacacgctggacagttcggcaaagtgcgttcaccttatggcctgctagcctctaataaattcttagaaagtctggagtccttatgtcgtatacccctgagttggttgccgaactggaaatccttgtgctcttcccattggacagcaccaaggaaggtctgaaagttcaccagaccgctgcgcccactgccatcgccgctgccatgcgcctgcacgcgaaaggacttatcgaccaaccggacgggggctacctgaccagccttggccgggacgctgcagaacaagcccagaccctgctgactatcttgaccaccgccaccaccaaagaagccgcctgatacctgacaccgcccatggagtccgccccgtgcggattccgagggcgttgccgtgcacgcgcaaaaaatctgacgtcaaaaaccatttctctctaaacctcctacgctactggctgtaaactcctacacggctgcccacgtcgggccctgcgagccaccgacctcgacatgacccgcacccatgaaatccgccccgacctggacgaaggcatcgaccgcaaggtgctggcccaattgcgtgcgcgtttcatggccctcaacgaaggccgcatggcccgggctgtcgaagggctgacaccgcgccagcaaagcgtgctgaccttgttgccgctgttcttccacgtcaatcacccgctgctgcctggctatgtgtcgggcagtacaccggccggcctctcgaatttcgagcccgacgcccaggcgttgaccgaagcccagcgcctgacccgctcgttctcctacaagccacgccacggcaacccaccacggccaatccacggcctgttcctcatgggtagccttggcaccctggcccaggccgaccagagcgacatggacgtgtgggtgtgtcacgcccccgatctcggcgaaaacgaactggccgaactgcgcaagaaatgccaactgctggaagcctgggccttgaccatgggcgccgaggcacacttcttcctgatcgagccgacacgcttcgtgctcggtgagcgcgacacccaactgagttccgacgattgcggcaccacccagcattacctgctgctggacgagttctaccgcaccgccatctggctggccgggcgtacgccgatctggtggctggtgccggtgtatgaagaaactcgttatgccgagttcacccacacgctgatttccaagcgctttatccgcgccgacgaaaccctggaccttggtcacctggcgcgcatccccccgggcgagttcatcggcgccgggctgtggcaactattcaagggcatcgagtcgccctacaagtcggtgctcaagctgctgctgaccgaggtctacgccagcgagcacccgaacgtgcactgcctgagcctgcgtttcaagcgggcggtattcgccaaccagatggatctggatgagctggacccgtacatcgtggtgtaccgccgcatcgaggaatacctcaaggcccgcaacgagcccgagcgcctggaactggtgcggcgcgcgctgtacctgaaggtcaaccgcaaactcagcgccggccagcgcagcaccagctggcaacgcctactgctggagcgcctggcccatgaatggggctgggaccagcgccaactgacactgctggacagtcgcagccagtggaaagtacgccaggtcgcctccgagcgccgcgcactggtcaacgagctcaattacagctatcgcttcctgacccagttcgcccgcaccgaacagaccgtcagcctgatcaacaagcgcgacctcaatgtgctgggccggcgcctgtacgccgcctttgaacgcaaggccggcaaagtcgagttcatcaaccccggcatcgccccggacttggccgaagacaccctgaccctggtgcaatcacccaatcgcaaggagccgggccagcaccactggggcctgtacaacggcaacctgacagccctggagtgggagcacttcgcgccgatcaagcgcagccgcgacctgctggagatgctcacctggtgccatcgcaacggcgtgatcgacagcagcacccgcctggccctgcaccccggcaccagcgacatgaccgagttcgagctgttcaacctgctgggcagcctgcaacagagcatcgccctgcccctggccagcgtcgatgaagagcgcctgctgcgctcggcagtacccgaggaagtgctgctactgatcaacgtcggcgtcgacccgctcaagcaccaccgcgacctgaacatcctgatgaccaccgagcgcaccgactccctgagctatgccggggtgcgcgacaacctcgtgctgaccctggaccaagtcacgctcaatagctggaacgaggtgatggtcagccgctacgacggccctcacgccctgctcgactgcctgcgcgactacctcaaccagttgccggcagaccatctgccacggctgcgggtgcgctgcttctgtcacaaccgtgcgcagttcattgcccagcgcgtggaagaaatcttcgacaccgcgcagaacctgctgctgggccagggcaatcatcgttacctgctccaggtgcagcagcactatcacgtgatggagttgataccgggccaggccactcacgtgtcactgccgacccaggaggcgctgatcgcctacctcagcgaagaactggccagctacagcccgctgcacctggacgccatggcactggaagaccatgacctggcgctgctgctgccgatgggcctggccgattgtgtgcaggtgttttaccgggtcaacgagggcttcgccgagctgtatgtgctggatgagttcaacgcgctgtggcaacagcgcttgccgttccatgacgaacagagcctgctggcgccgttgcagcgtttcttgcagtcgatcatttatcgccgcgacgcgctgtcaccgctggacccgcatgagccactgggcgcagtgcaaaccttgtattaccaactgttgccgtcgggcagcggtcgcgcgcgcggcatcgagcctcgtcctgcgccgttgaacccggcgaacaaaccgttctatgacgtgcaggcgattatcggcaaggcagcgctgggccaggtggggatcaccctgtactgcaatcagcgggagttttccgagctggaatttggcgaccagttgtttgcggtggtcgcccaggaaatcgtcgggcaacgccgggagcccgaacgttaccgctgctacatcaccgacctcgacctgtccggcctgctcggtgatgtgcaaagcccaagcaacctgtacctgcggtacaaggccgagctggaactgtcgctcaacgaggcgctgggccagatttaaagggggaaggcaccgccgtctttaggctggccttcaacactgagcaattccagcttgagcgtcttgccacccggggccggccagtcgatgtgctggccaacctgcagacccagcaaggcgctgcccaccggcgccaggatcgaaatcttgccttcatcggcattggcgtctttcgggtagaccagggtcaagtggtaatccttgccgctgccttgctcacggcaatgcacgctggagttcatggtcacgacacccgcaggcacttcatcgtggccaaccacttcttcggcgcggtcgagttcggcttgcaacgcttcgacgccgggagattcgtcgcccaggcggtcgatcagttgctccagacgctgcacgtcaagacgggtgaggatgatggacggtgcggtggtcatgattcaggcagactccttttttctgcacaaaaaagcaaaaccccgccaggaaaggcggggttctcacgggcctcgatgagttgaggcgtatccggacactaccacagcgtcacaaataaacaagacagcctcaggcgtgggcccggcgctgctcggcctcggcgcagatgatccggcgccgtgcatcgtcggcagagcgccattcacggatgtcttccacatggcggaagcagccgaggcagactttctgctcatccaggcgacacaaactgatacaaggtgacggcaccgccgggctgacattactgaacagtggcttgggcggacgtacggttgcagactgggtcacgatcaaatctcgtcgaagtccagcgcttcgccggtatattcctcgaccaggcgcgcgagcatttcacccaacagctcctcacttttgtcgcactgccatttgccgctttcttcgtcatagtcgaagtgaacgccaccggaacgtgctgcaagccacagctgacgcaaaggctcctggcggctgaagatcagttgctgaccgctctcgaacttgacggtcagcacgccagccgagttttccaggtccacgtccaggccgctgtcatcgaaaatatcttccagcgcctgctgggtcgaatccaccaggtcgtgaaaacgggcttcggtcaaactcattgtggcaacctcaaaagtgtctggttttgctcaagcgccgcacgatacgggcgagccccgccgattgcaaaggataccgattccatcgcgattggcggtacgaaatatccacggccagcgtagtccacttcgtaaccatgtcggcaaacccccgccggacgggtattccagcgcataggcaagctggcgggtggtcggtatactcgggcgcaattaatgcatattcaaggatttcgccatgaagcgcctgatctcttcccttgctgcgctcgtcgcggtcgcttgcctcgttagtgcctgtggtcaaaaaggcccgctgtacctgcctgatgacagcaaagacccgaatgaacaggcgcaatcgtcgcaaaaaccatccaaagcgcataagcacgacacctacgaataagggtactccatggacgcttttaactaccgggacggcgagctgttcgcggaaggcgtggcgttgtccgcgattgcccagcgctttggcaccccgacctatgtgtactcccgtgcgcatatcgaagcccagtaccgctcgttcaccgatgcgctcgacggcgtgccgcacctggtgtgctacgcggtcaaggccaactccaacctgggtgtactgaatgtcctggcgcgcctcggcgctggttttgacatcgtctcccgtggcgagctggaacgtgtactggcggctggcggcaaggcggacaagatcgtgttctccggcgtcggcaagacccgcgaagacatgcgccgcgccctggaagtcggcgtgcattgcttcaacatcgagtccaccgacgaacttgagcgcctgcaggtcgtggccgccgagatgggcgttcgcgcgccgatctccctgcgcgtcaacccggacgtcgacgccggcacccacccgtacatttccaccggtctcaaagagaacaagttcggcatcgccattgccgacgccgaagacgtgtacatccgcgccgcccaactgccgaacctggaagtgctgggcgtcgactgccatatcggctcgcaactgaccagcctgccaccgttcctggatgccctcgatcgcctgctggcgctgatcgaccgtctcggtgaatgcggcatctacctgcaccacatcgacctcggtggtggtgtaggcgtgcgttatcgcgacgaagagccgccgctgattgccgactatatccaggccgtgcgcgagcgcatcgaaggccgcgacctgacgctgatgttcgagccgggccgctatatcgtcgccaacgcgggcgtgctgctgacccaggtcgagtacctcaagcacaccgagcacaaagacttcgccatcgtcgacgcggcgatgaacgacctgatccgcccggcgctgtaccaggcctggatgaatgtcaccgccgtgacgcctcgcgccagcgaagcccgcgcctacgacatcgtcggcccgatctgcgagaccggcgacttcctggccaaggatcgtcagctggccctggaagaaggcgatctgctggccgtgcattcggctggtgcctatgggtttgtcatgagttccaactacaacacccgcgggcgtaccgccgaggtgctggtggacggtgatcaagcgtttgaagtgcgtcgccgcgagacggtagccgagttgtatgctggcgaaagcctgctgccggagtaagccatgctgctgcgttttaccaagatgcacgggctgggcaatgatttcatggtcctcgacctggtcagccagcacgcgcatatcctgcccaagcacgctaaacagtggggcgatcgtcacactggcattggtttcgaccagttgctgatcgtcgaggcaccgagcaacccggaagtggatttccgttatcggatcttcaactccgacggttccgaagtggaacagtgcggcaacggtgcgcgctgcttcgcgcgttttgtgctggacaagcgcctgaccgccaagcggcagatccgcgtcgagaccaagagcggcgtgatcgagctggatatccgcagcgatggccagatcagcgtcaacatgggcgcgccacgcctggtgccagcggatattccgttccaggccaccgagcaggccgtcagctatgcgctggacgtggacggcaagaccgtcgacatcgctgcagtgtccatgggcaacccccatgccgtgctgcgggtcaacgacatcaacaacgcgccggtgcatgagctgggcgcgaaaatcgaacaccacccgcgctttccggcacgggtgaatgtgggcttcctgcaggtgatcgaccgtacccgcgcgcaattgcgcgtgtgggaacgcggcgccggcgaaacccaggcctgcggcaccggtgcgtgcgccgctgccgtggccgcgatcagccaggggtggatggattcgccactgctgatcgacctgcccggcggacgcttgtccatcgagtgggcaggccctggccacccggtgatgatgaccgggccggcctcgcgcgtatacgaaggacaggtccgtctatgagtgagccaagccaatgaccgataagcctcaagtacccgcacccgctaccccgagcgacagcctggaggccgccactgttgcggcgtaccttgaggctaacccggacttcttcgtcgagcacgaagagttgctgccggcactgcgcatcccccatcaacgtggggataccgtatcgctggtggaacggcagatgaagatcctgcgcgagcgcaacattgaaatgcgccacaagctctcgcacctgatggacgtcgcccgcgacaacgatcgcctgttcgagaaaacccgccgcctgatcctgaccctgatggacgccaccagcctggaagaaacggtgatcgcggtggaagacagcctgcgccaggacttccaggtgccattcgtgagcctgatcctgttcagcgacaacccgatgccggtgggtcgatgggtcagcggcagcgacgcacaaaccgcaatcggcggcctgctgtccgagggcaagaccatcagcggcaccttgcgcgagcatgagctggacttcctgttcggcgccgaacagcgcaagcagatcggctccaccgccgtcgtcgccctcagtcatcaaggcctgcatggcgtgctggccatcgccagccgcgatcctcagcactacaaaagctccgtgggcaccttgttcctgacctacatcgccgaagtgctgggccgcgtcctgccgcggttcaccaccgccctgcgcgcggtgcgctagccatggaacggcaactggacgcttactgcgctcacctgcgcaacgagcgccaggtgtcgccccataccctggaagcctatcggcgggacttgaacaaggtcctggcgtactgcgagaaacaacggatcgacagctggaaggccctggatatccagggcctgcgcagcctgatcgcgcgcctgcaccaggccggccaatcctcgcgcagcctgtcacgcctgctctcggcggtgcgcgggctctatcactacctgaatcgcgagggcctgtgcgaccacgacccggccaacggcctgtcgccgcccaagggcgagcggcgcctgcccaagaccctggacactgaccgtgccctgcaactgctcgatggtgcggtcgaggatgacttcctggcccaccgcgaccaggcgattttggaactgttctattcctcgggcctgcgcctttctgagctgaccggcctgaacctggatcaactggacctggcagacggcctggtgcaagtgctcggcaagggcagcaagacccgcgtcctgccggtaggccgcaaggcacgggaggcgttgcagctgtggttgccgctgcgcctgttgaccaacccggcggacgatgcggtgttcgtcagccagcaaggccggcgtcttggaccaagggcgatccaggtgcgggtgaaggccgccggggagcgagagctggggcagaacctgcacccacatatgctgcgacactctttcgccagccatctgctggaatcgtcccaggacctgcgcgcggttcaagagctgcttggccactcggacatcaagaccacacagatctatacccatctggatttccaacacctggcaacggtgtacgacagcgcccacccacgggccaaacgcatcaaggacggcgactcatgagtatcaagctgatcaccttcgacctggacgatacgctctgggacaacgtacccgtcatcatcagcgccgaagcgtcgatgcgcgaatggttggcgcttaacgccgccaaagtcggcgatttgccgctggagcacttcgccagtcttcgccagcaggtgttggagcgccatcccgagctgaaacaccgcatcagcatcctgcgccaccgggtgttgaagcatgcgtttgaagaggctggttatccacagcctgaggccacggaaatggcggatgagtgcttcgaagcattcattcatgcgcgccaccagctcaccccgttccccgaagccgagcccatgctcaaggcactgcgtcagcacttcctgctgggtgtgatcaccaacggtaatgcggatgtgcagcgcgttggcctcgcggactacttccattttgcgctgcgcgccgaagatatcggcatcgccaagccggatgcgcggttgtttcaggaggcgttgcagcgtggtggcgtagacgctggtgcggcggtgcatgttggcgatcacccgggggatgatattgccggggcgcagcaggcggggttacgggcggtgtggtttaacccgacgggtaaggtatgggagggagacaagcgaccggatgcgcagattcgtagcctgacagagttgccggaactgctgcgcagctggaagtaataccgcaggtcaaaatgtgggagggggcttgcccccgattacagtgggtcagccaatatattcgttggctgatacgccgctatcgggggcaagccccctcccacattttttatcgccggtgacctccaggcatgaaaaagcccgcagcgacggcgggctttttcttacaagcaggtgacggacctcaaataggtcggctgccgtacttgttatccggcttcttcggtgggtctgccaccacgttggcctcgacttcctgcactttgccgcctttagcgaggaattcttccatcgcacgggccagggcatcacgctctttgttcttggcttcaacgcttggcaattcgtctaccgacacagctgccttggctttgcctttggcgaccgggacaggtgcatcatcgccaccgtcgtcgtcggcaacgtcttccgccgccgcttcgaggccttcttcggtgtcgtcttcgtcacctacttcgagttcgtcgttttccagatcatcgtcgctcatgttctacctcatgacttgcgaaaagcagattagttatagcccagcttcaccctctgtcgacggctgccggaaaaaaatcaacatccactggttaaccagtggcttatgccccatcaccgtgcaaggtggcgaggactttacgagcaccgccatgatcacggtgctcgcccagataaacaccttgccaggtccccatcgccaagcggccggccttcaccggcaaactcagctggcagcccaggagactggccttgaagtgcgccggcaggtcgtccggaccttcgtcgttgtgttcgaaccctgcacggccttgcggcaccagcgaattgaaataacgttcgaagtcacggcgtaccgccgggtcggcattctcgttgacggtcaacgaggccgaggtgtgctgcagccacagatgcaacaagcccacacgacaggccttcaattcaggcaagccggccagcaactcatcggttaccaggtgaaagccccggggcttggcccgcagggtaatcagggtctgttgccacatacagttctccgcccatcggcgcgcattctagcgcgctcagggaaaaaacaaagtgccgaatacgcctacatgcctgtaagacattggcatgcggaaaagtgccgtgtgcatcccatcacaaacatcgcttaaaaaccgctacagcgtgttacgactgacaaacaccaggcaaaaaaatgcccggcaagccgggcatctttttttcgcgtacttacaagttgtagccgcgttcgttgtgttgcgccaggtcgaggccgaccgcctcttcctcttcggtcacccgcaggcccatgaccatgtccagcaccttgaggatgatgaacgtcacgatagcggtgtagatcaccgtgaagccgacgcctttggcctggatccagacctgtgcagccacgtcagtcaccgtgccgaagccgcccagtgctggggctgcgaacacaccggtgaggatcgcaccgacgataccgccgataccgtgcacaccgaatgcgtccagggagtcgtcgtaacccagcttgcgcttgaggctggtggcgcagaagaagcagatcacaccggcgaccaggccgatcaccagggcgcccattgggcctacggtgccagcagccggagtgattgccaccaggcccgccaccacacccgaggcgatgcccagtgcgcttggcttaccgtgagtgatccactcggcgaacatccagcccagcgccgcagcagcggtagcgatctgggtgaccagcatcgccatgccggcagtgccgttggccgcagcggcagagccggcgttgaagccgaaccagccgatccacagcatcgccgcgccgatcagggtgtaaccgagattgtgcggtgccatcggggtggtcgggaagcctttacgcttgccgagcacgatgcacgccaccaggccagccacaccggcgttgatgtgcaccacggtgccgccagcgaagtcgagcactccccagtcacccagcaacgaacccggaccgccccacaccatgtgggcaatcggcgcatacaccagggtgaaccagacgcccatgaagatcagcatcgcggagaacttcatacgctcggcgaacgcaccgacgatcagcgccggggtgatgatggcgaaggtcatctggaaggtgacgaacaccgcctcagggaacagcgccgcagggccggtgatgctcgccggggtcacacccgcgaggaacaacttggacaaaccgcccacgaacgagttgaagttgacgacgcccgcttccatcccggtggtgtcgaacgccatgctgtagccgtacacgaaccacaggatggtgatcaggccggtgatggcgaagcactgcatcatcacggaaagaatgtttttggagcgcaccatgccgccgtagaacagcgccaggcctggaatggtcatgaacagcaccagcgcggtggatgtgagcatccacgccgtgtcgccggaattgaggactggagccgccacttcgtctgccgccatggccaggcttggcattacgatggacaacagggctccgagccctgcgaatttacgcagagtcatattgttttctcctggggcgttggggtttggcggcttagattgcgtcggtatcggtttcgccggtacggatgcgaatagcctgttccagattgaccacgaagatcttgccgtcaccaatcttgccggtgttggcagccttggttatcgcctcgataacccggtcaagatccttgtcgtcaatggcgacatcaatcttcaccttcggcaggaaatcgactacgtattccgcgccgcgatacagctcggtgtgacccttctgccgaccgaagcctttgacctcagtaacggtaatgccctgcacgccgatctcggacaacgactcgcgtacatcgtccaacttgaacggcttgatgatggcagtgactagcttcatgaaaactctctcccgaattggtggacttgccccaggaaaacaaacccgtctcaagtctaagcgcagtgcctggctttgtaacgcgtcgtcgcctcagcatttgccgttgcgacgccagcgaaccactggtgacgaaacctgtacccctgatccgtcggcgcactgcattcgtcacagcgactgcatcagtgcatgggtcatgatcgtctaagcagaaaccttgccagctccgtaaaaatcactgaaatcagtcctttgcccactttctcccaactgcggggctttttgatggcgtcaatgcgcacaaaaacagtgcgccaccgcccggcccgctgcgcgaaaagcgtgcgctcgccgccacggaaaagactatagacgctgcgtgatacactgccggccaacagttttccggaatatttcccatgctcgcgcccaaagacctcctcgacgccctgagcggccacgcctctcgcctgttcagcggcgacaccccgctgccccgcaatgaaatcgaaagccagttcaaggcgctgctgcaaagcggcttcagcaagctcgacctggtgagccgggaagagtttgatagccagatggtggtgctggcccgcacgcgggcgcggttggagagcctggaggcgaaggtagcggagttggaagctaggttgacgccgccctctgctgaataaacgcggtcagtgtgggagctggcttgcctgctcccacataaagcgctgcgaacgactctggatacgttctgtaaaacctccctcgcctcgcatttccccacctcgtctacccttgaaaaacccgcaggaagcggccctcttttcaaggaacgagcatgtccctcgccatcgtccacagccgcgcccagatcggcgtcgaagcgcctgccgtcaccgtcgaagtgcacatggccaatggtttgccgtccctgacactcgtcggcttgccggaaacagccgtcaaggaaagcaaggaccgggtgcgtagcgccattctcaactccgccctgcaataccccgcccgacgcatcaccctcaacctggcgcccgccgacctgcccaaggacggcgggcgctttgacttggcgattgcgttgggcatcctggcggccagcgtgcaggtgccagccttgctgctcgacgacgtggaatgtctgggagaattggcgctgtccggcgaggtgcgcgcagtgaaaggcgtgttgcctgcggcattggcggcgcgcaaggccgggcgcaccgtgatagtgcctcgggcgaatgccgaggaagcgtgcctggcctcggggttgaaggtgatcgcggtggatcatttgctgcaggtggtggcgcacctgaatgggcatcagcctatagaaccctacaaatccgacggcttgctgtacctgaacaagccatacccggacctgagcgaagtacagggccagctcgccgccaagcgcgcattgctgattgcagcggcgggcgcgcataacctgctgttcagcggcccgcccggcaccggcaagaccttgctcgccagtcgcctgccgggtttgttgccgccgttgagcgagcaggaagccctggaagtggcggcgatccagtcggtcgtcagccttgcgccgctgagtcactggccacaccgaccgtttcgccagccgcaccactctgcctcaggtccggcattggtgggcggcgggtcgaaaccgcagccgggggaaattaccctggcccatcacggcgtgctgttcctcgatgagttgcctgagttcgaccgcaaggtgctggaggtgctgcgcgagcctctggaatcgggtcacatcgtcatctcccgcgcccgcgatcgcgtcagcttcccggcccgcttccaactggtagccgccatgaacccctgcccttgcgggtacatgggcgaacccagcgggcgttgtcgctgcacgccggagcagattcagcgctatcgcaacaagctctccggccccttgttggaccgtattgatttgcacctcactgtggcgcgagaaaccaccgcattgaacccaacccagcaggcgggcgataacaccgccgaggcatcggcacgggtcgcccaggcccgcgatcgccaacagcaacgccagggctgtgcaaatgcgttccttgatctgccggggctgcgcaagcactgcaagctgacgaagaccgatgaaggctggctggaaaccgcctgtgaacggctgacactatccctgcgcgctgcccatcgcctgctcaaagtggcgcgtaccctggccgaccttgagcacgccgagagcattactcgaccgcacttggcggaagcgttgcagtatcggcccgcggccgtcggctagggtgcctctgggaagtccaacagcaggcgcgccacttccatcacttcatccaaggccgcttccgccgactccatggagggtttgagcatcaggtcgtcggcatagcccatcgccacggcaaagatctggcgggcagcgcgttgtggcgagtcacaacgcaggacattggcagccacaccccgctcgatcacctcgacgagcatgccttgccattgggcgttgatcgccaggtaagcctgggccatttccgggtcctgcatcgcttcgtcccaagcatccagccacagtgcccaccctgcatcagcggtgcttggcaggcagtcacgcaaaaaacccacaaaggcgtccaagggcgctgcttctgccaggggcgcgcgcacttcgtccaactgttcgttggcaaaccgcacgaaggcttcgcggcgcagttccttccagtcgctgaagtagtgatagacatggctgcgggacaggccggcatgttcggccaggtcgcgggtggacacatcggcaaaacccttgctgcgaaacagctcaagggcggcggcgatgatctggtctttacggtcgatacgcgacatgggcaattccttccaggcaccggcagataagcggcgcttgctttttgagcgatcgctcaaggatacttgagcagtcgctcaataatagcgtctatcactcctttggtgcaccccatgtcatccgccacacctcaaatcctgatcgaagaaagccggaaaatcggccagcaatccgccggccagacgctcaaggccattgccaaagcctatccgggcaagctgtttgccacgctgtcgctggtcgcgctggagaacgcgctgctgctggcctacccgttgtttgccgggtttgcggtggacgcgatcatccgtggcgacgccagcaacgcgctgttctacgccgccgtggtcctggcattctgggtggtcggcgcggcgcggcgggcgttggatacgcggaccttcacacggatctacgccgatctggcggtgccggtgatcctcaatcaacgcctgcagaaccacagcacgtcgaaatcggcggcacgggtggtgctcgcccgggagttcgtcgacttctttgaaaagcatgtaccgatcattgccacggcgctggtgtcgattatcggcgcggcggtgatgttgatcgtgatcgagccctgggtaggcctggcgtgcctgggcgcactggtgctgtgcatcacgttgttgccacgctttgcccggcgcaaccaggagctgcatgaacggctgaacaaccggctggaaaaagaaatcggcctggtggaaaaggtcggcgcaccgaccctgcggcgccactaccaggtgctttcacgcctgcgcatctggctgtcggatcgtgaggcggctgcgtacctgtttctgggtacgctggccgccttgctgtttgtggtcgccatcagccaattggcgctgtcacccgcggtcaaggctggccatatctacgcggtcatgacctacctgtggaccttcgtcaccagcatggacgaagcccccggcatggtcgaccaactggcgcgcctgaaggacatcggcaagcgcgttgaccctggcctgggcgatcgctaggcctcaacgaaaccggtccacctcatgccgcaagcccgccgccagggtttcgagttccttggcggtgatcgccaggttcgacaccacttcccgctgctcgctgttggccagcgcaatgctctgcaagttgctgctgagcaaggtcgcggtgctgctctgttcctgggtggcggtggtgatcgcggcaaactgctgaccggccgagcggctctgctcgtcgatacgcgccagggccgacgccacatcggcgttgcgcgacaggccttcctgcatcagcacattgccgtgttccatggtgctgatggcgttgccggtttcctgctggatgctctggatcatcccggagatttcatcggtggcctcgcgggtgcgcgacgccaggttgcgcacttcatcggcgactaccgcaaacccacgaccctgttctccggcacgagccgcttcgatggcggcattgagcgccagcaggttggtctggtcggcgatcgaggtgatcacgccgacgatcccgccgatctcctgggagcgctggcccagggtattgatcaccgtggccgtgctgttgagcgcttcagcgatgtgctccagggacgacgacgcctcttgcatcgagttgcgcccgatgcgggtttgctgggcgttttcctgggccaggcgttcggtgctgcccatgttgtcggcgatgttcagcgaggtggcactgaactcttccaccgcgccggccatgctggtgatctcgccggactgctgctccatgccttcataggcgccaccggacaaaccggacagcgcctgggcacggctgttgacctcttcggccgccttgcggatatgcgagaccatggtcgacagcgcttcacccatctggttgaaactgcgcgccagttggccgatttcgtcatggctggacacgttcaagcgtgcgctcaagtcgcccgcgcccaaggcttcggcctggcgcaccaggtctcccaacggcgccagcttgctgcgcagcagccacaccgttgcaccgaccgccagcagcatggccagcacgctgccgatcaccaggcggataccgacgtcccacgtcaccgagcggatttcggccttgggcatgctcgcgaccacggcccacggcccgccttcgaaaggcaccgacacgctgtagaagtcttcgttcttgtctgcccagaaaccccctgtacccggcgtcttggccaggtccagcatcacgggaatggcttgatccagcgcctgcacgcccgccggcggtaccagccagcgcttctgctcatccagcaaggcgagggagccggtctggccgatgcggaaacgcttgaggttctcgaactgggcattctgcgcatcggtgtagtcgaacccgatgaacaacaccgcgatcacctgcccactgctgtcgcgcaccgggctgtactgggtcatgtaggagcggtcgaacagcaccgcgcggccgatataggtctgcccgccgagcacccgctggtaagccgggccctggcgatccagcaccgtgccgatggcgcggttgccgtcctgcttggtcaacgaggtgctgatacggataaagtcttcgccgctgcgcacgaataccgtggccacgccgccggacatctgcttgaactcatccacttcattgaagttgttgttcaacacctgattgcccaggtacaagcttggggtctgcacaccggccacggtcacaagctggtccgcatgcacgctcaagccagcgccgaagcgcttttcaaacagcccgctcaaacgctgggtactttcgcgcaaggtgctgtggaaggtgttgagttggtcggcgagcaaacgtgcctcgctggccaggtgctcctcgcgggtagcgaggttggcggagtcgagggaacgcaaggcaaacacggtgctgccgctgatgacgacagccagaatcacggctaatgccaggcctaactgggaggctatccgggcgcgaggttgagacatgacggctcctggccgaggccaggatcatcctgatctcatagcgctgctcggcaaattatctggtgggaaacgttggtgcacgatggttccaacacacctacttcggcgggctgaagcaatacttgagcgattcacaggggtatcacgcaaacgattgcacaaacggtcagcgactcctcaatcgaggcgttcgacctggggcagttccatggccttgacttccgcctgcagaaactccgccaagcgccgcaaacgctcaccgccggggcgggttttcggccataccaggtagtagttttcgccactggccaccgccgttggccaaggcaggctcaggcgcccctgggccacgtcttcggccaccatcagcaagtcgcccatggaaacaccgtaaccccgcgcagcggcgatcatgcccagttcgagagtatcgaacacctggccgcccttgagcgacacctgggacgccaaccccatgcgttgcagccaattgcgccagtcgcgacggtcgggcgtggggtgcaacagttcggcggtggccaggcgcgcagcatcccacggcccatcctccaacaggttcggtgcacctaccgggatcagcagttccgggaacaggtagctggcctcccaatccgccgggaagtgcccgtagctcagcaacaccgcgcagtcgaacggctcctgattgaagtccacctcgtccacgctcatccacgcgctggtcagttgcacttcattgcccggctgcaacgcccggaaacggctcagccgcgccagcagccagcgcatggtcagggtagacggcgccttcatgcgcaggatgtcgtcttcggcgttcagggtatggcaggcccgttccagcgcggcgaaaccttcgcgcacgcccggcaagagcaggcgcgccgcttcggtgagctgcaaggtgcggccgctacgctggaacaggcgacaggcgaaatgctcttccagcgtgcggatatgccggctcaccgcactttgcgtgatggagagctcctccgctgcccgggtgaaggaattgtgccgcgaggcggcctcgaatgcgcgcaaggcatacagcggggcaagacgtcgagacatcggcagattcctacagagcaataccgcaccctaccagatcagcaggcatgagtttaagtcatgtacatcatcgctttaatccttttgtgtaatgaaccgagagcgccgagaatcaagccttcccaaccttctgacttttcgagcgtgatgatcatgcaacatccggcacgtaccgaactctgggccattctgcggctgtcagggccgttgattgcctcacagttggcgcacatgctgatggtgctgaccgacaccctgatgatggcgcgcctgagccccgaagccctggccggtggcggcctgggcgcggcgacctactcgttcgtggcgattttctgcatcggcgtgattgccgccgtgggcactctggtggccatccgtcacggcgcgggcgatatcgaaggcgccacccgcctgacccaggccgggctatggctggcgtggctgatggccctggcggccggtttgctgctgtggaatctcaagcctgtgctgctgatgtttggccagaccgagaccaacgtgcactcggccgggcaattcctgacgatcttgcccttcgccctgcccggttacctgagtttcatggccctgcgcggcttcaccagcgcaatcggcaaggcgacgccggtgatggtgatcagccttggcggtacggtaatcaactacctgctcaaccacgcgctgatcgaaggcatgttcggcctgcccaagcttggcctgatgggcatcggcctggtcacagccatcgtcgccaacggcatggcgctgacgctgatgtggtacatccgcagcaaccgcacctatgcggcctacccactgagtaccggcctgctgcgcctcaacacccagtacctgcgcgagttgtggcgcctgggcctgccgatcggcggcacctatgcggtggaggtcgggctgttcgcgtttgcggcactgtgcatgggcaccatgggcagcacgcagttggccgcgcaccagatcgcattgcagatcgtctcggtggcgttcatggtgccggcggggatgtcctacgcggtgaccatgcgcatcggccagcactacggcgccgggcagttgctgcatgcgcgcctggccggtcgtgtcggcattggctttggcgcggcgatcatgctgggatttgctggcgtgttgtggctctattccgacccgctgatcggactgctcatcgaccacaacgacccggcgttccacgacgtgatcgtcctggccgtcagcctgctggccgtcgccgcctggttcgaactgttcgatggcgtgcagacaatcgccatgggctgcattcgcgggctcaaggacgccaagaccaccttcctgatcggcgcaggttgctattggttgattggcgcaccgtcggcctggctgatggccttcaccctgggctggggaccgaccggcgtgtggtggggcctggcgttgggcctggcgtgcgcggcggtgagcctgacctgggcgtttgaggcaaagatgaagcggatgcttcgccaggagcctgaacctcaaggctcattccaagccgaggccctgcacgattaacaatgtgggagggggcttgcccccgattgcggcgtgcccgtcactggttttttgactgacccaccgcaatcggaggcaagcctcctcccactttttgattggattgccacctcagcccagcagcgcttgctggcttttgccgaaagtcaggtactccaccaactccggcaacggcagcggcttgctgatcaggtaaccctgggcctggtcgcagccaaacaaacgcagcagcgccagttgctcaggcgtttcaacaccttcggccaccacttccaggttgaggttgtgcgccaggttgatcatggcatgcaccagcttgcggttttcttcgcgctcctccataccgccaacaaagctcttgtcgatcttcaacaaggcaatcggcaggctgttgaggtgcacgaacgatgagaagcccgtaccgaagtcatccagggaaaaccgcacacccaggcggccgagggcatccatggtctgcttgaccaggtcactgcggcgcatcacggcggtttcggtcagctcgaactccagccattgcgcctccacgccccgctcggcaatcagccgactgagggtcgagagcaactgactgtcctggaactggcggaacgagaggttgaccgccatgtgcaacggcggcaggccacgttcgcgcaggtcttgcatgtcgcgcagggcccgggagatcacccagtagcccagcggcacgatcaggccgctttgctcggccagtggcacgaactcactcggcggcaacaggccgcgctcgccatggcgccagcgcaccagggcttccaggccgacgatatggccgtcgtccaggtccaggcgcggctggtaatgcagctccagttcgtcacggcgcaaggcgcggcgcagctcgctttccaggtcggcgaggctgcgcgcgttgcggttgatacgttcgttgaagatatgaaaagtgcagccctgggtgctcttggcctgctgcatggcgatatgagcgtgccacatcagcgggtcggcaccggcacgggccctggcatgggccacgcccaggctacaaccgatcagcaggctttcgccatccacccaatagggctcggccatgacttcggtgatgcgctcggccatccactcggcacgctggggcgcacgacgggtgtcgatcagcagggcgaattcatcgctgcccaggcgcgccagttggtcgccgacctcgagctggctcttgagccgcgacaccacttgcaggatcaaccggtcgccggcctggtggccgagggcatcgttggcgtggcggaagttgtcgaggtccaagtggccgagggccaggccacggccttcattctcggccaggcgcgcggtcaacagggtctggaagccctggcggttggcaatgccggtgagcgggtcctgttcagccaggcgttgcagggtgttttccagcaccccacgctcgcggacgtggcgcaggcagcggcgcactgtatcggcatccaatacatcacgcaccagccaatcgctgacgccaagcggcgaaaccagcggttcctgttccagcaacaacacgcacggcaggctgcaacggccaggcccgggttgcaggccgggcgtggtcaagagtacggcgctgtggtcgtcatcgaacagacggctcacggattcccagtttggtgcgctgatcagcacagccccatcgcccatcggcgccaggcactcgcgcaataacgctgcccacgcgggctcatcggccagcagcagcaaacgcaagggttcgacaggcgtagacaagctagctccctagactctgcaaaaattcgtggcgacgcgcattatgacgtgcggcctgagaatcaccaatgataggggttatcaaacacgcgaactgtgaacattagcctcaaaacaaccctcacatcctgcggcaaagtatcaaaaccggcaaatttagatcgagtggtacgtcacactgtcgttctgacagagcagaatcctgccagcctgttaaaatgcccgcccttttgaacaacgactccctgaattctgtatgtcccgactcaatccccggcagcaagaagccgtgaactacgtcggcggccctctattggtgctcgccggcgcaggctccggcaagaccagcgtgatcacccgcaagatcgcgcacctgatccagcagtgcggcatccgcgcccagtacatcgtcgccatgaccttcaccaacaaggctgcgcgggaaatgaaagagcgcgtcggcaccctgctcaagggtggcgaaggccgtggcctcaccgtgtgtaccttccacaacctgggcctgaacatcatccgcaaggagcatgcgcggctgggctacaagccgggcttctcgatcttcgacgagaccgacgtgaagtcgctgatgaccgacatcatgcaaaaggaatacgcaggcgacgatggcgtggacgagatcaagaacatgatcggcgcctggaaaaacgacctgatcctgccgccccaggccctggaaaatgcacgcaaccccaaggaacagactgccgccatcgtctacacccactaccagcgcacgctcaaggcgttcaacgcggtggacttcgacgacctgatcctgctgccggtaaagctgttcgaggaacacgccgacatcctcgaaaaatggcagaacaaggtgcgctacctgctggtggacgaataccaggacaccaacgccagccaatacctgctggtaaaaatgctgatcggcaagcgcaaccagttcaccgtggtcggcgacgacgaccagtcgatctacgcctggcgtggcgcccgcccggaaaacctgatgctgctcaaggacgactacccgtccctgaaagtggtgatgctggagcagaactaccgctccaccagccgcatcctgcgctgcgccaacgtgctgatctcgaacaacccccacgaatttgaaaaacaactgtggagcgagatgggccacggcgatgagatccgcgtgatccgctgccgtaacgaagacgccgaagccgagcgcgtggccgtcgagatcctcagcctgcacctgcgcaccgaccggccctatagcgatttcgcgatcctctatcgcggcaactaccaggccaagctgatcgaactgaaattgcagcaccaccaggtgccgtatcgcctgtcgggcggcaacagctttttcggacgccaggaagtaaaagatctgatggcctacttccgcctgatcgtgaacccggacgacgacaacgccttcctgcgcgtaatcaacgtgccgcgccgcgaaatcggttccaccaccctggaaaagctcggcaactacgccactgaacgcaagatctcgatgtacgccgccaccgacgaaatcggcctgggcgaacacctggactcgcgcttcaccgatcgcctgtcgcgcttcaagcgcttcatggacaaggtgcgcgagcagtgcgccggcgaagacccgatcagcgcgctgcgcagcatggtcatggacatcgactacgaaaactggctgcgcaccaacagttccagcgacaaggccgcggattaccgcatgagcaacgtctggttcctgatcgaagcgctgaagaacaccctggaaaaagacgaagacggcgagatgaccgtcgaagacgccatcggcaagctggtgctgcgcgacatgctcgaacgccagcaggaagaggaagacggcgccgaaggtgtacagatgatgaccttgcatgcgtccaagggcctggaattcccctacgtgttcatcatgggcatggaagaggaaatcctcccgcaccgctccagcatcgaagccgacaccatcgaagaagaacgccgcctggcctacgtgggcattacccgcgcgcgtcagaccctggccttcacctttgccgccaagcgcaaacagtacggcgaaatcatcgattgtgcccccagccggttcttggatgaactgccgccggatgacctggcctgggaaggcaatgacgacaccccgaccgaggtgaaggccgttcgcggcaacaccgccttggcggacatacgcgcgatgttaaagcgctagaatcgactacttttcaatctactttcggcgcacaccgcgtcattagaggaagctttccgtggaagcactgcacaagaaaattcgcgaagaaggcatcgtgctttccgatcaggtactcaaggttgacgcctttctgaaccaccagatcgacccggcgctgatgaagctgatcggcgacgaattcgccgcactgttcaaggactcgggcatcaccaagatcgtcactatcgaagcatcgggcatcgcaccggcgatcatgaccggcctgaacctgggtgtaccggtgatcttcgcgcgcaagcaacagtccctgaccctgacggaaaacctgctgtcggcaacggtgtattccttcaccaagaaagtcgaaagcaccgtggcaatctccccgcgccacctgaccagcagcgaccgggtgctggtgatcgatgactttttggccaacggcaaggcgtcccaggcgctgatctcgatcatcaagcaggccggcgcgaccgtcgccggtttggggatcgtgatcgagaagtcgttccagggtgggcgtgcggaattggatgcacagggttatcgggttgagtcgctggcgcgggtcaagtcgctggaaggtggcgtcgttaccttcatcgaataacccctgccttaaagtggttgtaacagtgggagggggcttgccccctcccacattgaccctgtgttgcctgtcagtgcgcggtggcctgtaggccggcgagtaggagccgctggtacagatcctctttcagcccctccggcttacctaaccgcatccgctccagatgcttgggaaacacctccggttccggcgcatccaacgccgccttgcccagctccagaatctccgtcagcttgaatttgctcttgagccagttcagcgcccgcaacaaatcccgttcttcatcagtgaaatcactgcccagcggatactccggaaacaaccgacgatggcgtgcctgaatcccctgcaagcgctccggcgtgttatcggcaaagcgcggatccagctggaaatccttgggcagcttgccggccttttgcgcctccttgatcaaatcgtcctggaagcgtgagtcggtgatattgagcaacgcctcgatcaccttggcatccgtctgcccgcgcaagtctgcaatgccatattcggtgatgacaatatcccgcagatgccggggaatggtgcagtggccgtagtcccagacgatattggaactgacctcccccgctgactcgcgccaactgcgcaaaatcagaatcgaccgcgcaccttccagcgcatggccttgggccacaaagttgtactgcccgcccacaccactgagcacacgaccgtcttccaactggtcggccacgcccgcgccgagcagcgtcaccatgatcgcgctgttgataaaccgcgcatccaaccgctgcaggcgcttgagttcttcctggccgtacagctcgttgatgtagctgatgcgggtcatgttgaattcgaggcgcttggcgtgagtcatttcctgcaggcgctggtagaaactgcgcgggccaagaaaaaaaccgccgtggatcgaaatgccgtcgggctgcgccgcatcgtcgagcgtgccggcgttggcctgctgttgcgtggccacatccgggtagaccttgcgacggataatccccgcgtccgccagtaccaacaggccgttgacgaacatttcgctgcacccgtaaagcccccgggcgaaggggtcgacaccgccttcacggctgatcagcggtgcccactggtacacgtccaggtcggtcagcagcgagcgataggactcattgtcggcctggcgcgccagcaacgcggcggtcagcgcatcccccatggagccgatgccgatctgcaaggtgccgccatcgcgcaccagggtgctggcatgcaagccgataaaatggtcctggaaacccaccggcatattcggcgtggagaacaacgtggtgctgtctttttcatcgatcaggtaatcgaaggcatccatgcccagctcagagtcgccgggcatatagggcaaatcgctgtggacctggccaacgatcagcacggtttcaccggcatcacggcgcttggcgatcatcggcaacaggtcgagggtgatatccgggttgcagctcaggctcaggcgatccggatgttcgctgctgctggcgaccagttgcgccaccaggttcaagcccgctgcgttgatgtcgcgagcggcgtggctgtagttgctgctgacgtaatcctgctgcgccgactcgctgtgcagcaagctgcccggctgcatgaagaactgctgcacatggatatttttcggaaggctgtcgttgtgcaggtcggcgaggaaatccagctcggggtaatcgccgaacacccgctcgataaagggttcgagaaagcgtttctgcaaaccatcgcccatcgtcgggcggcccaggctcaacgcggtatagatggtcagcgcccgctccggcaacttggcgatgcgccggtacaaggcattggcaaaccggttcggcttgcctagcccgaggggcatgcccatgtggatatgcgccggcaaccgcgccagtacgtcgtcaactgcttgctcgattgaacacaactgcaccatccgaccctcctgaacattccatgattaggggttggaccgagcttgccgggtctttgctgcaatgaacagcgctgaaacaccaatcccaggcacaaaaaagccgctcgtaagcggcatttttgacgaagatcggcggatcagaggccagacatcttcttgattgcacccttgaggtcatcatccgagcaatcggcacaggtgccttttggcggcatcgcgttgataccggtgatcgccttggccaggatgccgtcaaggccgccctggtgatcggcgcgttctttccaggccgctgtgtcgccgattttcggcgcgcccaacaagccggtgccgtggcaagcgttgcagtgcttggcgatgatgtcatctggcgtcttcgcagcgccgccgcctgcggcgaccgccacctccatgcccttgcattcctggccctggacgcagacctggccgacaggctccaggcgcttggcaatatcatcattggtcgcagcttgagcgctgacagcccatagggccagtacggttgctggtgcagccagcattttcataattaggttcacgcgttcaccctcaatggtggctattcacgcctgcggccacggtttcgcaggcggcgaaagtataacggttagcccgcctggccgaaacaaccctattaaataaagggagattcgacctcacggaatacagctcgggtgcctctgcgacgctggcaggacgcctcttttcttaaaagttcgcgggtgtggctgcgctgattagtcgcgccggcacgtcgaacggattgcgaaaacgatggggcttggtgctttcaaagtagtagctatcgcccgcttcgagcacaaaagtttcaagaccgaccaccaactccaggcgaccttccaccagaatcccggtttcttcgccttcgtgggtgagcatttcttcgcctgtgtcggcgcccggcgggtagatttcgttgagaaacgcaatcgcccggctggggtgcgcccgtcctaccagtttcatggtgacggcgccgtcggagatgtcgatcagctcattggctttatagacgatctgcgtcggtatttcctggaggatctcctcggaaaagaactcgaccatcgacatggggatgccgcccagcaccttgcgcaaggagctgatcgaggggctgacgctgtttttttcgatcatcgaaatggtgctgttggtgacacccgcacgcttggcgagctcgcgctgggaaagacccttcagtttacggatggattgcagtcgttcgccgacgtccaatgcaggagcctcctaggattcaggctttgttgtaattgagcgttatcatggcgacagcgttcagtatttacaacacttgggcctaaatcccgggcggttgcgttcgtgcctggcgatcaagccccggaatagagccttggcacgcggcgcaggttgcagaacagctgataggggatggtctcggcggcaaccgcgacgtcactggcgaggatatgtttaccccatagctccacggtggaaccaaggccggcttgcggcacgtccgtgaggtcgatgcacagcatgtccatggacacacggcccagcaattggctgcgttgaccggccaccagcaccggcgtaccggtcggcgcgtgtcgtggatagccatcggcataacccatggcaactacaccgatacgcatgggtttcggtgtgatgaacttggcgccgtaacccaccggctcccccgccggcagttcacgcacgcagatcaccttggactccagggtcatcaccggctgcaagcgcgcagccacggcctggtcttcgccaaacggtgtagcgccgtaaagcatgatgccgggacgcacccaatcgctggacacagccggccagcccatcaccgacggcgaattgcgcaggctgacctcggccgccaagccctggcgcgccgcgtcaaacaccgccacctgttcatcgctgcgcacgcagtcgagttcatcggcacgcgcgaaatggctcatcaaaacgatcttggccactttgccgctggccagcaggcgctggtaagcctcgtggtaatccttcggatgcaggccgacacggtgcatgcccgaatcgagcttgagccagacagtcagcggcttgctcagtacggcctgttcgatggcctccagttgccacagcgaatgcaccacgcaccagaaatcatgctcgatgatcagcggcagctcgtccgcctcgaagaaaccttccagcaacagcacgggtgcacgaataccggcggcgcgcagctccaatgcctcctcgatgcaggccacggcaaacccgtccgcctcggcttccaacgcttgggcgacgcgcacggcaccatgcccgtaggcatcggccttgatcacggcaagggccttggcccccgtgacttcacgggccaattggtagttgtggcgcagggcttggaggtcgatcagggcacgggcaggacgcatggcggcaggcttctaggcggcaaagtgaagaaaaaccggcaccgacagacagcatcggcaccgggagagggatcggtgattaaggcagcgcggccacaacggacagctccaccaggatttgcggttcgcacagcttggcttcaaccgtggcacgggccggggcgacacccttgggcagccacttgtcccacaccgcgttcatgccggcgaaatccgcgtcgatgtctttcaggtagatcgtcaccgacagcagcttgctcttgtcggtgccggccaggtcgagcaaacgctcgatattggccagggtttcacgggtttgctgttcaatcccggcgttcatgtcgtcaccgacttgccccgccagatacacggtaccgctgtggacaacgatctggctcatgcgctcattggtgagctggcgctggattgacatgttgtgcggactcctggtggttgccataacgggaaatatcgaggccttcggcactgatctgcggggttttcttcgccatcaggtcggccagcaaacgaccggaaccacacgccatggtccaaccgagggtgccgtggccggtattcaggaacaggttcttgaacggggtggcaccgacaatcggagtgccatcgggggtggtcggacgcaggccggtccagaaactggcttcggtcaaatcgccgccctgaggataaaggtcgttgacgatcatctccagggtttcacgccgacgcgggttaagcgacaggtcaaaaccggctatttcagccatgccaccgacgcggatgcggttgtcgaaacgggtgattgcgaccttgtaggtctcgtcgagaatcgtcgaagtcggcgccatcgccgggttggtgatcggtacggtcagcgaatagcccttgagcgggtacaccggcgccttgatccccagcggcttgagcagcttcggcgagtagctgccgagggccagcacgtaacggtcggcggtctccagcgtgccgtcgatccacacgccgctgatgcgatcaccggcgtagtcgagacgctggatatcctgttcgaagcgaaattgcacgcccagttgcttgcacatgtcggccaggcgggtggtgaacatctggcagtcaccagtctggtcgttcggcaggcgcagggcgccagcgagaatatccgtgacgctggccagggccggttcgacgcgggcgataccggcgcggtcgagcagctcgaacggcacgccggactccttcaacacggcgatgtccttggccgcgccatcgagctgcgcctgggtgcggaacaactgggtagtccccaggctgcggccttcgtaggcaatgccggtctcggcgcgcagttcgtcgaggcagtcacggctgtactcggacagacgcaccatgcgctccttgttcaccgcgtaacggctggcggtgcagttgcgcagcatctgcgccatccacaggtattggtcgatgtcggcggtggccttgatcgccagcggcgcatggcgttgcagcagccacttgatagctttgagcggcacgcccggcgcggcccatggcgaggcatagcccggggacacctggccggcgttggcgaaactggtttccatggcagcggcaggctgacggtcgaccacaaccacttcaaagccggcccgcgccaaatagtaggcactggtcacaccaatgacgccgctacccaagaccagaacgcgcatttttatatcctcatcgcgggcatggccgctgacgtgtgttattcgagcaatgatgagcgcagtgtaaaaaacaattgccagtgcatttcactatataactgcctatatttggcgacaattctcggcaaaaacccttttcacagaggcgtatcccctatgcgtaccaacacccagaccaagcgggagctggacaagatcgatcgcaacatcctgcgcatcctgcaaaccgacgggcgtatttcgttcacggagctgggggaaaaggtcgggctgtcgaccacgccctgtaccgagcgcgtgcgccggctggagcgtgaagggatcatcatgggctacaacgcgcggctcaacccccagcatttgaaggggagtttgctggtatttgtcgagatcagcctggattacaagtccggcgacaccttcgaggagttccgccgcgccgtactgaaactgccccatgtgctggagtgccacctggtttctggcgacttcgactacctggtgaaggcgcggatttccgagatggcgtcgtaccgcaaattgcttggcgacatcctgctcaagctgccccatgtacgggagtccaagagctatatcgtgatggaagaggtgaaagagagcctgaacctgccgatcccggactgacctgagacactcgggtcaacatgtgggagggggcttgccccctcccacatttggactgtgtaaaaccgctaaaccaacacctgccgggtgctcgccatgtagtcgtggatctgcttttccacccgtgggtgaatcagctccaccgggcgccgtccattcgggcacggaagggtcttggtggtgccgaacaacctgcagatcaacgggcgctcgtcgtacaccgtgcagccgttggggcccaagtgcacgcagttcagctcctccatggccgcgtcctgctcagccgcagtcttacgcggcaggcgcgacatttcctcgggcgaggtggttaccggcccacagcagtcgtggcaaccggggacgcactcgaacgaaggaatctgcctgcgcagggcgctgactttctgactgttgcaactcatcgaaacacgtaccgaacggcgaataggcgtggattctgccgcaaaacgccctgcgcagacagcttcgtccgaccgctgtatcctgcgtcaaattttccaaacagggatgctccccatgactgccagcgcccggcacaccgcttcctactacgccgccagcagcgtgccgcaacctgagtacccggtgttgaccggcgaactgaccgcggatgtgtgcgtggtcggcggcggtttctcggggctgaacaccgcgctggagttggccgagcgtggattcagcgtggtgttgctggaagcgcgcaagatcgcctggggcgccagcgggcgtaacggcggccaactgattcgcggcgtcggccatggcctggaccagttcgccaacgtgatcggcaccgagggcgtacgccagatgaagctgatgggcctggaggcggtggagattgtgcgtgagcgcgtcgagcgctaccagatcccctgcgacctggcctggggctactgcgacctcgccaacaaaccccgcgacctgcacggcctggccgaagatgccgaagaactgcgcagccttggctatcgtcacgacatacgcctgctgcaagccaacgaaatgcccagcgtgattggctccgaccgctacgtgggcggcatgatcgacatgggctccggccacctgcacccgctgaacctggctctcggcgaagccgccgccgcgcagcatttgggcgtgaagctgttcgagcagtccgaagtcacgcgcatcgactacggccccgaagtcagcgtacacaccgcccaaggcaacgtgcgcgccaagactctggtgctggcctgcaatgcctacctcaatggcctcaacccgcacctcagcggcaaggtgctgcccgccggcagctacatcatcgccaccgagccgttgagcgcagcccaggccgccaacctgctgccgcagaacatggcggtgtgcgaccagcgtgtcacggtggattacttccggctgtcagccgaccgccgcctgctgttcggcggtgcctgccactattccggtcgcgaccccaaggatatcggcgcctatatgcgcccgaaaatgctgcaggtattcccccagttggccgacgtaaaaatcgatttccagtggggcggcatgatcggcatcggcgccaaccgtttgccgcagattggccgcctggccgaccaacccaacgtgtattacgcccaggcctacgctggccatggcctcaacgccacgcacctggcgggcaagttgctggccgaagccatcagcggccagcaacagggccgcttcgacctgttcgcccaggtgccgcacatcaccttccccggcggcaagcacctgcgctcgccgctgtaggcgctgggcatgctctggcaccgcctcaaagagctggtctgatcaatcgcgccagaacggtttcagcccctcgtcgcgtgcctgctcagcggtcagcccgacgtcgcgcaattgctccctggtcaggtgcaataaagccttgcgcgtgtggcgacggtgccagaacagaccccagcgactgatatcgcgcggcgccgtcgcccgctcctgcccagcctccagttcctgactgtgtaacgccagccgcacatcgctcatgccgttcattttgctgcccctcagttgcttgttgccttgagtgaccagcatgagcgcgcggccaaaaccattacagattcaaccctgccttattaaatccatacagatgctgcctttggacggctgaatcctgtattttctgcctatctgtaatggtcactcgggagcgaccgccatgaccctgtacataaacctcgccgaattgctgggtacccgcatcgaacaaggtttctatcgccccggtgatcgactgccttctgtacgggccttgagcgtggaacatggggtcagcctgagcaccgtgcagcaggcttatcggttgctggaagacaacggcctggcgatgcccaagccgaaatccggctacttcgtacccgtcggccgcgagttaccggccctgcccgaagtcggtcgtccggctcagcgccccgtggacatttcccaatgggaccaggtgctggagttgatacgcgcaacgccgcgcaaggatgtcatacagatgggtcgcggcatgccggatgtattgtcgcctaccttgaaacccctgttgcgcagcctggcgcgcgtgagtcgccgccaggatctgccgggcctgtattacgacaacatcctcggctgtatggagctgcgcgagcaaattgcgcgtctgtccctggattccggctgccaactgacggccgaggacatcgtgatcaccaccggctgccatgaggcgttgtctgccagcatccatgccatctgtgagccgggcgatatcgttgcggtggactcaccgagctttcacggcgccatgcagacgctcaagggcctgggcatgaaagccctggaaatccctaccgacccgatcaccggcatcagcctcgaagcgttggagctggcgctggaacagtggccgatcaaagtcatccagcttacccccaactgcaacaaccccctgggctacatcatgccggaggcgcgcaagcgggcgttgctcaccttggcacagcgcttcgacgtggcgatcatcgaagacgatgtctacggcgaactggccttcagctacccgcgcccgcgcaccatcaagtcgttcgacgaagatggccgtgtgctgctgtgcagctcgttttcgaaaaccctggcacccggtttgcgcattggctgggtggcaccgggccgatacctggaacgggtgctgcacatgaaatacatcagcaccggctccacagcgactcaaccgcagattgccatagccgagtttctcaaagggggccacttcgaaccgcatttgcggcggatgcgcactcaataccagcgcaatcgcgacttgatgctcgattgggtcagccgctacttcccgacgggcacccgtgccagccggccacaaggcagcttcatgctgtggatcgaactgccggaaggttttgatacgttgaagctcaaccgcgtcctcgtggaacaaggcgtgcaagtagcggtaggcagtatcttttccgcttccggcaaataccggaactgcctgcgcatgaactacgctgccaagccaaccgcgcagattgaagaggccgtgcgcaaggtcggggctgcggcgatcaagatgctggcggagacggccgactgacctttaccggaaatttgccgtcatatgccgacaaccgccctgatctggaagccgatcccttgatgattcaacggctattaccgttttgcctgttaggggccctggccctgggcggctgcgccagcgtgagcacgccgcgcgtccccagcgacgccctgcctgccgcgcaatcgtcgttcggccgctcgatccaggcccaggccgcgccctatcaggggcgctcgggctttcgcctgctgcccaacagcagcgaggcgttcatggcccgcgccgagctgatccgcaacgcccagaccagcctcgacctgcagtactacatcgtgcacgacggcatcagcacccgcatgctggtggacgaactgctcaaggccgccgaccgtggcgtgcgcgtgcgcatcctgctggacgacaccaccagcgacggcctcgaccagatcatcgccaccctcgcggcccaccccaagatcgagatccgtctgttcaacccgttgcacctggggcgcagcaccggcgtgacgcgggccatgggccgcctgttcaacctgtcgctgcaacatcgacgcatgcacaacaagctgtggctggcggacaacagcgtggctatcgtcggcggacgcaacctgggggatgagtatttcgatgccgagcccaacctgaacttcaccgatatcgacatgctcagcgtgggcccggtggccgagcaactgggtcacagtttcgaccagtactggaacagcgcgctgagcaagcctatcgatgacttcatctccaacgcgccgtccaagggcgacctcgccgccgcgcgcgtaagcctggaagcctccctggccgagtcgcgccagcagaaccacgcgttgtacaaccgcctgcgtacctacaagacccaaccgcgcatggacacctggcgccgcgagctgatctgggcctggaaccaggcgctgtgggatgcgccgagcaaggtgctggccaaggccgacccagaccctcggctgctgctcacaacccaactggcgccggagctggagggggtcaatcacgagctaatgatgatttctgcgtacttcgtgccgggacagccaggcctggtgtatctgaccgggcgcgccgatgcgggcgtgtcggtgagcctgctgaccaattccctggaagccaccgatgtgcccgccgtacacggcggttacgccccctaccgcaaggcgctgctggagcatggggtgaagctctacgagctgcgccgccaacccggggatggcggcggcagtggcccgcacctgtttcgccgaggcactttccggggctcggattccagcctgcacagcaaggcgatcatctttgatcgggagaaatcctttatcggctcgttcaacttcgacccacgctcggtgctgtggaacaccgaagtcggtgtgctggtcgacagccccgagctggcggaacatgtacgcaacctggcactgcaaggcatggcgcccgccctgagctatgaagcgaaattgcaggacggccaggtcgtgtgggtgaccgaagataacggccagttgcacaccctgacccgcgagcccgggagctggtggcgacggttcaatgcgtggtttgccaccagtgttggccttgagcgcatgctctaggccgcttgtgccgcaccgaatgcgccctggcgcagcagcaacatcaccaggccaagcgcaccggccgccatcagcagcggcagcgcatgcccgctgatccactggctacccgcccctgccaccaatgggccgatcaggcagccgataccccacagctgcgccacgtgggcattggcgcgcaccagcgcgtcgtcgcggtaacgctcgccgatcaagatcaacgacagggtgaacaagccgccagcacttgcgccgaacacgacccagatcggccagatcattggcgtgtgcatcaataacggaatcgccaggctcgacaccagcaacagcagcgcacaccccaggaacaacgtgcgccgcggcaagtagtcggccagtgcaccgatgggcaattgcagtaatgcgtcgccaaccaccaccgtgctgaccatggccaaggcgatctcggcggtgaacccttgttgcaggcagtacaccggcaacaacgtcaggatcatcgcctcgaacgcagcgaacagcgccaccgcccaggcaatcgctggcaggctccggcagaagcgccacagttgcgcgaacgtcacgctgaaggattcggcgctcggtgcaccggaacgtcccagcagcaacagcggcgcaaccatcaacaggccgacacccacccagaaaccgtagtcatgatcggtgccgatcaagcctaacagtaacggacccgacagctggctcaaggcatagctgcagccgtacagcgccaccagccggccgcgccactgctccacaaccaactggttgatccaactctcgccgaggataaacacgatggtcaggatcacgccgatcatcaggcgcagcaccagccacaccgggtagctgggcaggatcgccagcaggccgatggacaccgcgcccgcccacaggcacaggcgcataaggttggcggtgccaagccatgaggccaggcgactggaaaccttcgcgccgagcaatacgccaaaggccggcatcgctgccatcacgccaatcgcgaaactgccgtagccccagctttccaggcgcaaggacaccagcggcatgctgacgcccagggccaggccgacgctgagcaccgaggccaggacggcgaaataagtcgcccaacgcatttccacgctcctgtggatcatttttaagttcacacaaaccagtgtgggagggggcttgcccccgattgcggtgggtcagtgagcaccgctggcgcctgacacactgctatcggggggcaagccccctcccacatttaacctgcggtgctgcttagagcttgatccaggtcgccttcaactcggtgtatttgtcgaacgcatgcagcgacttgtcacgaccgttgcccgactgcttgaagccaccaaacggtgcggtcatgtcgccgccatcgtattggttgacccacacgctaccggcgcgcagggccttggcggtcaggtgcgccttggagatgtccgccgtccacactgccgcggccaggccgtagatggtgtcgttagcaatggcgacagcctcttcggcgctgtcgaaggtgatcaccgacaggactgggccgaagatttcttccttggcgatcttcatcgcattggtcacgccatcgaaaattgtcggctcaacataggtgccgccggtttcttccagggtgcgcttgccgccggcgaccaacttggcgccgtcggcatggccggcttcgatgtacgagagcactgtgttcatctgctgggtgtccaccagtgcaccgacgttggtcgcagggtccagcgggttgcctggtttccagcccttgagggcctcgatcaccagcggcaggaatttgtccttgatggagcgctccaccagcaggcgggaaccggcggtgcagacctcgccctggttgaaggcgatggcgccggcggcagactcggcagcggcttgcaggtccggagcatcggcgaacacgatgttcgggctcttgccgcccgcttccagccagacacgcttcatgttcgattcgccagagcggatcaacagttgcttggcaatcttggtggagccggtgaacaccagggtgtcgacgtccatgtgcagcgccagcgcgttgcccacggtatggccgtagcctggcagtacgttgaatacaccttgtggaataccggcttcaacggccagtgccgcgatgcggatggcggtcagcggggatttttcggacggcttgaggatcaccgagttaccggtggacagcgcaggccccagcttccagcaggccatcatcaacgggaagttccacggcacgatggcgccgacaacacccacgggctcacgggtcaccaggcccaattggtcgtgcggggtcgcggcgacttcgtcgtaaatcttgtcgatggcctcgccgctccagctcagggcattcgccgcgccgggtacgtcgatgttcagggagtcgctgatcggcttgcccatgtccagggtttcgagcagcgccagttcttcggcattggccttgagcaacgcagcaaaacggatcatggcggatttgcgcttggccggcgccaggcgcgaccacacgccggaattgaaggtggcgcgggcgttttcaacggcgcgttgggcgtcggcggcgtcacagctggcaacagtggccagcaggcgaccatcgaccgggctgatgcattcgaaggtgtcaccggaaacagcggcggtgtactcgccattgatgtaggcgcggccttcgatcttcagatccttggcacgttgttcccagtcggcacgggtcagggtggtcatgcgagtgtcctcctcttattgaatacaagggccacgggatatcccacagcagccttaaagaattcttgcccgccagccaatggttcggcgcaaggcagctgccaccctaaaccagcggctgggggtgtttcaatatatttgacataacgccggcaaacgcccttgcgatgttcattttaataaacatagactttgggctctccaaccgcaggccagacgggacacgcacatgagcatccaggacatcgtcgacttcagccaagccaagaccgccgccgagcgctaccgccctgccgccgagaaaatcctcaagggcgatcccgagcaaacgatctacaaccactacaacagcccctgcggccagatgagcgcgggcgtgtgggaaggtgaagtcgggcagtggacggtcaattacaccgagcatgaatactgcgaaattgtgcagggcgtgtccgtgctgcgtgatgccgacggcaacgccaagaccttgcgcgctggcgaccgcttcgtgattcccgccggtttcagcggcacctgggaagtgctggaggcgtgccgcaagatttacgtggtgtttgaacagaaggcctgatcaagacggcgggacgcggagcgtccgaggcgtcgttcccacgcagagcgtgggaacgatcaggcaaaaaaaagcccggatcgtgagatacgggctttttttcacaaggaggaaaatcaattacttgattttgccttctttgtagatcacgtgcttgcgaacgcgcgggtcgaacattttcttttcgagcttgtccggggtagtacgcttgttcttgtcggtagtgtagaagtgaccagtaccggcgctagagatcattcgaatcaattcacgcatgatatagctccttagattgtgccagcgcggcgcaattcagccagcacgacagtgatgccacgcttgtcgatgatgcgcatgcctttggcagatacgcgcagacggacgaaacgtttctcttcttcaacccagaagcggtgatgctgcaggttcggcaggaaacgacgacgggttttgttatttgcgtgggaaatgttattcccagtcaccggacccttaccggtaacttgacagactctcgacatgcctcagccctctaaaaccacatgcccaacccggcatgggttggccgcttaatctctcagtcatttggcgccaggcgccgcgtttctttagggtcttaccggctacacctacaagcgaaggaaccgggcccctagaaaagagcgctgctttataccagaaagaccccagtgcaacaacagcccgcgtgtttttactggcgtaaatcttggcggcagacgcctgaaccgttgccaggaggggccgctgtcacagccgaccgctcgtcgcacagaatgatttacagcgcgcgcgggcacagtgaagtgcacgacgaaacgcactgaggcgccatcaaaacagcatttggcgcaaaagcacaggcaaaaatgggctagtcatttacctatcagaccactacggtaggacttttccagactgcactcgcagatgggccttcgatctgcaaaggaaaccgaacatgcgcctcgctgccctaccgctattgctagcccctctctttatcgccccgctggcctctgccgccagcaccttgagcgtctgcaccgaggccagcccagaagggttcgatgtggtgcaatacaactcgctgaccaccaccaatgcctcggccgacgtgctgatgaaccgcctggtggactacgacgcgaccagcggcaagctggtgcccagcctggcggacagctgggacgtctcgccggatggcctgacctataccttcaagctgcacccggatgtgaaattccatcgcaccgagtacttcaccccaagccgcaccctgaccgccgaagacgtgcgtttcagcttcgagcgcatgctcgacccggccaacccctggcacaagatcgcccagagcggcttccctcacgcccagtcgctgcaactaccgacgctggtaaaaaagatcgacgctctcgacccactgaccgtacgtttcaccctggatcacgccgactccaccttcctcgccgcgctgagcatgggcttcgcgtcgatctacccggccgaatatgccgacaaactgctcaaggccggcacgccggagaaactcaacagccagccgatcggcactggaccgtttatcttcagccgtttccagaaagatgccgtggtgcgctacaaggccaacccggactacttcgccggtaaaccggctgtggataacttgatcttcgccatcacgccggacgccaacgtacgcctgcagaaactgcaccgcgacgagtgccagatagccctgtcgcccaagccgctggacgtgggtgaggccgaaaaggacccggcgctcaaggtggagaagaccgctgccttcatgaccgccttcgtggccatcaacagccagcacccgcccctggacaagcccgaagtccgccaggcgatcaacctggcgttcgacaaggggagctacctcaaggccgtgtttgaaggcaccgccgaggccgccaacggcccgtacccacccaacacctggagctacgccaaggacctgccgggttatccacaggacctcgccaaggccaaggcgctgctcgaccgcgccgggctcaaggacggcttcaagaccactctctggacccgccccaccggcagcctgctgaaccccaacccgaaccttggcgcacaactgctgcaggctgacctggccaaggtcggcatccaggccgagatccgcgtgatcgaatggggcgaactgatccgtcgcgccaaagccggcgaacacgacctgctcttcatgggctgggccggtgacaacggcgacccggataacttcctgaccccgcagttttcctgcgcggcggtgaaatcgggcaccaacttcgcccgctactgcgacccggcgctggacaagctgatcagcgcaggcaagaccaccagcgagcaaggcgtgcgcagcaagctgtaccaacaggcccaggcgcagatccagcaacaggcactgtggctgccactggcccacccgactgcatttgcgctggcccgcaaaaatgtcgtgggttatcaggtgagcccgttcggacgtcaggatttctcgaaggtcagcgtccagccctgagctgaaagctgcaagcccgcttgaggcttgcagctgctcccctcctacatccacccgtattccgccatcgacaacggatcgccatcccccacgataatgtgatccagcacccgcacgtccaccacttccagcgccttctgcagcaacttggtcaattttcgatcagcggcgctcggctccaggctcccggaaggatggttatggcacaggatcaacgccgccgcgttgtaggccaaagcgcgcttgaccacctgccggggatacaccatcgccgcgtcgatggtgccttgggacaacgcctcgaagcccagcaccctgtgccttgaatcaaggaacaggcagccgaagatctcatgaggctcatgacgcagcatggccttcaggtagtcccgcacggccaccgggctttccagcaccgagtcgcttcgcaggcgctcggccatgtgccgcttggccatttccagcaccgcctgtaactgggcaaacttcgccggccccaggcccaattgttggttgaacaatgtttggctggcctccagcaacgggcgcaatccaccgaattgcgccaaaagatggcgcgccaggtccaccgcgctcctgccggaaaccccggtacgcaggaagatcgccagcaactcggcatccgacaggctcgccgcgccccactccaaaagcttttcccgcggccgctctgccgccggccaatcacgaatactcatccctcctccctctccctgtatgccatgcgtatcgctgttgcctcgcggacgctgtgttatcgtaggccctcttttttgcaggcgatttcccctggggagggggcatcgcaggcgtcattgaactggcaacactgaactggaaaggcaaaccaatgcagcgtctgtatcggaaacgcatcgttctcggcgttggcggcggcattgccgcctacaagagcgcagagctggtccgcaggctcctggaccagggcgccgaagtgcgcgtggtcatgacgcgcggtggcagtgaattcatcaccccgctgaccatgcaggccttgtccgggcacccggttcacctggacctgctggaccctgcggccgaagccgccatgggtcacatcgagctggccaaatgggccgatctggtgctgatcgccccggccaccgccgacctgatcgcgcgcctggcccaaggcatcgccgatgacctgctgaccactctggtactcgccaccgacgccaccgtcgccatcgccccggccatgaaccaggccatgtggcgcgaccctgctacccaggccaacacccaacttctgcaaagccgaggcctcaaggtgttcggcccggcatccggcagccaggcctgcggcgacgttggcatgggccgcatgctcgaagccacagacctggcgctgtgcgccgccgagtgcttccagcacctggccctcaccggcaagcacgtgttgatcaccgccggcccgacccaggaaaacatcgacccggtgcgctacatcaccaaccatagctcaggaaaaatgggctttgccctggccgaagcggcggtcgaggcaggcgcacgcgtcaccctgatcaccggcccggtgcatttgccgaccccggatcgggtcacgcgaatcgacgtcgtcagcgcccgcgacatgctggcggcctgtgaggcagccattccgtgcgacctgttcatcgcctcggcggcggttgcggactaccgcccggaagtcgttgccccgcaaaagctcaagaaagaccctacgagcggagacggcctgctcctgcaaatggtgcgcaacccggacatcctggccaccatcgccacgcgcccggaccgtcctttcagcgtcggtttcgccgccgagaccgagcatttgctggactacgccgcacgcaaattgaaagacaagaacctcgacctgatcgttgccaatgatgtcgccaacccgagcatcggcttcaacagcgaggaaaacgcctgcagcgtgatcgaccgcgacctgcacgccacccttttcgcccagaccagcaagggcaagattgcccgccaactgatctcttttatcgcccaacggctgaaccaggtttaatttccatgcacgctttgcaagccaagatcctcgacccacgcatcggcagcgaattcccactgccggcctacgccaccccgggctccgcaggcctcgacctgcgcgccatgctcaagcaagacaccgtccttgaaccgggccagaccatcctgatccccaccgggctgtcgatctacgtgggtgaccctggcctggcggcgctgatcctgccgcgctcgggcctgggccacaaacatggcatcgtgctgggcaacctggtcggcctgatcgactcggactaccagggcgagttgatggtgtcgtgctggaaccgtggccagaccgcgttcaacatcgccgtcggcgagcgcattgcccagttggtattggtgccggtggtgcaggcgcacttcgaactggtcgaggagttcgatgaaacccaacgcggcgcaggcggttttgggcattccggcagccattgattgttcctacgcgcgtgcctcggtgctgccgttatgcttttaaggaacatgacggggattgcgctttatgacgaacgattcgcgaataaaacggcaccatgccgctggtcacgcctccatcacccataacagcttgaaacccgggctgttactggcggcaaccagcgtgatcgccgccggtgcgctgttctggtttggcgcgtgggtgccactgcacaacgaataccgccagcacgttgcgcaatccgccgctgcgattatcagcaagtccgtcgcaacggccgccgataaactcgcactgcaagccgagatcaacgccaaaaccccggcactcgcgaacgctgtccggtccaatcgaccggatatccggcaggccgcagaacaccatctacccgcacgggaggggttgaccagcacttggctcaccccccttcgccaagcgcccctgggcgatagcctgccgcctcaggtgctggacatgattggtcgcgcggagcgtaacgtgccgccaataccggaaatttacaaaagtggcgaccgttggcttttctatagcgtaattgccttgcgcgaagccacgcacgccccgatcatcggcaccctgacccaggcatacgacctccagccattgaccgaacaactggcgtcgctgcccccagaggtgggaacctttcgtttgtcccagcgcgtctggaacgatcccgagcaggtgatcttcacccagggccacagcgcgtcaccagacacctacacgcttgccgtaggcgataatcatctatcattgagcttcagccccggggcgctgtatcagttcgcttacccccgtcagcagcttgtgttgatggcgttggccgcgctacttgccctggtgggtgccatggcaggcgtatacctgtgcttcaggcggtcccaaatgttaatcaacaacggctgtggaataggtacagccccacgccacgaactctcctcccaaaatgccgtccaagccccaggcatgaccccactggtcagtccccaggatctttcaagacaggagcccccccaagccatgagcaatccagcccgtgtagccccgatcttccccgacagtatcttccgcgcttatgacatccgtggcgtggtgcccaaaaccctgaccgccgaaaccgcctactggattggccgggccattggcgcccagagcctggcccaggacgagcccaacgtgtcggtcggccgtgacggtcgcctgtccggcccggagttggtggaacaactgatccagggcctggccgacagcggttgccatgtgagcgacgtgggcctggtgccgacgccggcactgtactacgcagccaacgtactggctggcaagtccggggtgatgctcaccggcagccacaacccgtcggactacaacggtttcaagatcgtcatcgccggcgacacgctggccaacgaacagatccaggccctgcacgaccgcctgaaaaacaacgacctgaccagcggcaagggcaccgtcaccaaagtcgacatcctgcaacgctactctgatgaaatcaccggtgacgtcaaactcgcgcgccgcctcaaggtggtggtggattgcggcaacggcgcggcgggcgtgatcgccccgcagttgcttgaagcgctgaattgcgaagtgatcccgctgttctgcgaggtcgacggcaacttccccaaccaccacccggatccaggcaagccggagaacctggtggacctgatcgccaaggtcaaggaaaccggcgctgacgtgggcctggcctttgacggtgacggcgaccgagtgggcgtggtgactgaaaccggcgagatcgtgttcccggaccgcctgttgatgctgtttgcccgtgacgtggtggcgcgcaatgccaacgccgagatcatcttcgacgtgaagtgcactcgccgtctcaccccgctgatcaaggaatatggcggtcgcccgctaatgtggaagaccggtcactcgttgatcaaaaagaaaatgaaggaaaccggcgccctgttggccggcgaaatgagcggccacgtgttcttcaaggagcgctggttcggctttgacgacggtatttacagcgccgcgcggttgctggagatcctcagcaaggaaaaatctaccgcagaagagctgttccagaccttcccgaacgatatttctacgccagagatcaatatccatgtgaccgaggagagcaaattcagcatcattgacgcactgcacgatgcgcaatggggcgaaggcgccaacctgaccaccattgatggtgtgcgagtcgattacgccaaaggctggggcctggttcgcgcgtccaacaccacaccggtgctggtcctgcgtttcgaggcggataccgaggctgagttgcagcgcatcaaggacgtgttccacgcccagttgaaacgtgttgcccctgatctccaattaccgttctgattttttaccggagccctgaatgaccctcgaacgcgaagccgctgccaacactgccaaggtcctgtccgaagcgttgccttacatccgacgctatgtcggcaagacgctggtgatcaagtacggcggcaatgccatggaaagcgacgagctgaaaaccggctttgcccgcgacatcgtgttgatgaaagccgtggggatcaacccggtggtggtgcacggcggcggcccgcaaatcggcgacctgctcaagcgcctgtcgatcgagagtcacttcatcgatggcatgcgcgtcactgacgcgcagaccatggacgtggtggagatggtcctcggcggccaggtcaacaaagacatcgtcaacttgatcaaccgccacggcggcagcgccatcggcctgaccggcaaggacgcggagttgatccgcgcgaaaaagctgacggtgacccgtcagacaccggagatgacccagccggaaatcatcgacatcggccaggtgggcgaagtggttggcgtgaacaccgacctgctgaacctgctggtcaagggcgacttcatcccggtgatcgcgccgatcggcgtgggcgccaatggcgagtcctacaacatcaacgccgacctggtggccggcaaggtggccgaagcactgaaggctgaaaagctgatgctgctgaccaacatcgccggcctgatggacaagcaaggcaaagtcctgaccggcctgaccacccaacaagtggacgatctgatcgctgacggcactatctacggcggcatgctgcccaagatccgctgcgcgctggaagcggtgcaaggcggggtgggcagctcgttgatcatcgatggtcgagtgccgaatgcggtactgctggagatcttcacggataccggcatgggtacgttgatcagtaaccgcaaacggccttaagacaccagaaaacaaaaggccccgttcaatctgattgagcggggccttttttgtgcttgaacacactgtagatccaaatgtgggagggggctttcccccgattagcggtgtatcagccaaataactgcaactgacactccgtcatcgggggcaagccccctcccacactagcctttacacacaagggagctcggggtcagacgccaaactgctcgcgatatgcacgcaccgccggcagatgctgcttgagctgcggatcatcttccaggaactgcaacacctggttcaacgagacgatgctcacgactggaatgccgaaatcgcgctccacttcctggatggccgacaactcaccgttgccacgctcctggcggttcagcgcgatcagcacgccggcggccttggcgccgtcctgggaagcaatgatctgcatcacttcgcgaatagcggtgccggcggtgatcacgtcatcgatgatcagcacatcgcccttgagtggagcgccgaccaggctgccgccttcaccgtgggccttggcctctttacggttgaagcaccaaggcaggtcctgcccgtgatgctcagccagcgccacggcggtcgccgccgccaggggaatacccttgtaggccgggccaaacagcacatcgaaggaaataccgctctcaacgatggcagccgcatagaaacgacccagctgagccagggccgaacccgagttgaacagacccgcattgaagaagtacgggctggtgcgtcctgacttgagggtgaactcaccgaagcgcaaaaccccgcgatcgatggcaaaacgaatgaaatcgcgttgatacgcctgcatgaaaaaagcctcagataccacggatttagctaattaggtagacggcgtgtatcatacacgcacgcgatttttggggccatttatgcggatcatcagtgtgaacgttaatggtattcaggctgcagtcgagcgtggtttgctcagttggctgcaagcccagaatgccgacgtcatctgcctgcaggatacccgcgcctccgcctttgaactggacgacccagccttccaactggatggctacttcctttatgcctgcgatgccgaagtgcccacccaaggtggcgtagctttgtattcgcggttgcaacccaaggcggtcatcagcggcctcggcttcgagacagccgaccgctacgggcgctacctgcaagccgatttcgacaaggtcagcatcgcgaccttgctgcttccttcggggcagaacggcgatgaagacttgaaccagaagttcaagctaatggacgatttcgcccgttacctggataaacagcgacgcaaacgtcgcgagtacatttattgtggctcgctgtacgtggcgcaacagaagctggatatcaagaactggcgcgacagccagcaatccccgggcttcctggcgccggaacgggcctggatggacgagattgtcggcaacatgggctatgtggatgccctgcgcgaagtcagccgcgaaggcgaccagtacagctggtggccggacaacgaacaggctgagatgctcaacctgggctggcgcttcgactaccagttgctgaccccgggtctgcgccggttcgttcgcagcgcacgcctgccgcgccagccgcgcttctcgcagcacgcgccgctgatcgtggactacgactggacactgaccatctgaggtcttttcccaggcacaaaaaaaccgacatcgctgtcggtttttttgtgggtgctcattatttgatcacacgccaggtcaagggatagcggtaggcgatccccttgttggccttgatgctgccaatgatggtcagcaccaccgtggcgatcgccagggcgaacatcaggaaaaaaccaatcaccgcgaaagccagcaccatgcaagcgatccaggcgatggcgacggtgatctggaagttcagggcttccttgccctgatcatcaatgaacgagtccacttctttcttcatctgccataggatcagtggccccacgacgctgccgaaggggaacacaaaccccagaaaagccgcgagatgacacaacatcgcgccctggcgcacttcgtaggaaggtgtcggcaccggcatttggctgttgtcattcatggcgattctccttgagacgggctcagtcagccagggcggcgttctgcagttcgaagatctcggtcatgcctttctgggccagggccagcatcgcgttcagttcggccggctggaatggcgcgccttcggcggtgccctgcacttcgatgaaaccaccggtgctggtcatcaccacgttcaggtcggtctcggcagccgagtcttccaggtagtccaggtccagcactggctcgccctggtacatgcccaccgaaacagcggcgatcatttgcttgagcgggtcaccgcccttgaggccgccacgcttcttgatcactttcagcgcgtcaaccagggccaccatggcaccggtgatggacgcagtgcgggtgccaccgtcggcctggatcacgtcgcaatcgacgtacagggtcacgtcgcccagcttggacatgtccagggctgcgcgcagggaacgaccgatcaggcgctggatttccagggtgcggccgccttgcttgccacggctggcttcacgctggttacgctcgccggtggcgcgcggcaacatgccgtactctgcggtcagccaaccctggccctggcctttaagaaagcgcggtacgccgttttcgacgctgacggtgcagatcaccttggtatcgccaaactcgaccagtacggatccctcggcgtgtttggtgtagttgcgggtgatgcggatcgagcggagctgatcggcagcgcgaccacttggacgtttcataggggatacctgtactgaggacgaaaaactgccgagcattatagagccgcgggccgattcggggcactgctaaaaaatccggttacgaatgcccgggtttgggcgcactcgccccactgcgctacaatcctgcgccttcccaatcatcagcccgcatttacgggactgcaacgcgaggtacctccatggtgcacagcatgaccgcctttgcccgcgtcgaaaaagccggcgtacaaggcaccctgagctgggaactgcgctcggtcaacagccgctacctggagccgcatctgcgcctgccggagtcgttccgcgacctcgaaggcgctgtgcgtgaagcgctgcgccagggcatttcccgtggcaagctggaatgcaccctgcgctttaccgaagaaaccaccggcaagccgctgcaggttgaccgcgaccgcgccgcgcaattggtcgccgccgccgaaaccatcgccggcctgatcaagcagccggccgcgctcaaccccctggaagtgctggcctggcccggtgtgctggtggccgacgccaccgacccgcaagcgctcaacgccgaagccctcgccctgttcaatcagggtttgaaggagctcaaggccggccgcgagcgtgaaggcgccgagttggcccgcctgatcagcgagcgcctgacctcgatcgaagaagacgtggtcaccctgcgcgagctggtcccgcagatgcttgccgcccagcgccagaaggtcctcgaccgcttcaccgacatgaaggccgacctcgacccggtgcgcctggagcaggaaatggtactgctggcgcaaaagagcgatgtggccgaagaactggaccgcctgagcacccacatcctcgaagtacgccgcgtgctcaagtccggcggcgccgccggtcggcgcctggacttcctgatgcaggaactcaaccgcgaagccaatacactgggctccaaggctttcgatccgcgcagcaccacggctgcggtcaacctcaaggtgttgatcgagcagatgcgcgaacaagtacagaatattgagtaaggcaacctccatgacccacagcaccggcaccctttacatcatttccgctccttcgggcgcgggcaagagcagcctggtcaaggccctgaccgacgctgacgagcagatccgcatctcggtctcccacaccacccgcgccatgcgcccgggcgaggtgaacggggtgcactatcacttcgtcgagcgcaccgagttcgtcaagatgatcgaacacggcgacttcctggagcgcgccgaagtgttcggcaacctctatggtacttcgcaaagccacttgcagcagaccctggacgaaggccacgacttgatcctggaaatcgactggcagggtgccgaacaagtgcgccagctgatgcccaaggcgcgttcgatctttatcctgccgccgtcgcttgaagcgttgcaccagcgcctgaccaaccgcggccaggacagtgacgagatcatcgaaggccgcatgcgtgaagccgtcagcgaaatgagccactacgtcgactacgactacttgatcatcaacgacgatttttcccacgcactggatgatctgaaggcgattttccgcaccaatcagctccagcaaaagcgtcagcaacagcgttttggcaaattgctggccgaactgctcggttgattggctcttcccaaaaccgctgcaagggctttacattggcacttgtagcggttttgcgagggcctgcgaaaaatcagcgcttccctaaacgctggtgattttttaaactgtttagtccgctcgcccaaccgggcagcgcgcatcttgcattcgctccgaggaataccatggcccgcgtaaccgttgaagactgcctagaacacgtggataaccgctttgagctggtcatgctctctaccaagcgtgcccgtcaactggccactggcggcaaagagcccctggtccagtgggaaaacgacaagcctaccgttgtcgccctgcgtgaaatcgctgaaggcctgatgagctacgagttcatcgccaacgccgaaatcgttgaagacgaaccgctgtttgcagcgttcgaggacgagtccaacgaggccgtctaagcctatgcctggtcgacgtagcacggcgcggggtcacagccaacggcaggagttcacactttgccgagcatagacgccctcgccgatcgcttatcggcctacctcggcccagaccaggtcaacctggtccgccgagcgtatttctacgccgaacaagcccacgacggccaacgccgccgcagcggagaggcgtatgtcacccatcctcttgcggtggccaacattcttgccgacatgcacatggaccatcagagcctgatggccgcgatgctgcatgacgtgatcgaagacaccggcatcgccaaggaagcgctcagcgcgcaattcggcgaaaccgtggccgaactggtcgacggggtcagcaaactgacccagatgaacttcgagaccaaggccgaggcccaggcggaaaacttccagaagatggccatggccatggcccgcgatatccgcgtgatcctggtcaagctggccgaccggctgcacaacatgcgtacgctggaagtgctctccggcgaaaaacgccggcgcatcgccaaggaaaccctggaaatctacgcgcccatcgccaaccggctgggcatgcatgccattcgtatcgagttcgaagacctcggtttcaaggccatgcacccgatgcgttcggcacgcatctaccaggcggtcaagcgcgcccgtggcaaccgcaaggaaatcgtcaacaagatcgaagaatccctgagccattgcctggcgatcgacgagatcgagggcgaagtcagcggccgacaaaagcacatctacggcatctacaagaagatgcgcggcaagcgccgggccttcaacgagatcatggacgtgtacgcgttccggatcatcgtcgacaaggtcgacacctgttatcgcgtactgggcgctgtacataacttgtacaaacccctgccgggtcgcttcaaggattacatcgcgattcccaaggccaacggctaccagtcgctgcataccacgctgttcggtatgcacggggtgccgatcgagatccagattcgcacccgcgaaatggaagagatggccaacaacggcatcgccgcccattggctgtacaagtccagcggcgacgagcagcccaaaggcactcatgcgcgcgcccgccagtgggtcaagggcgtgctggaaatgcagcaacgcgccggcaactccctggaatttatcgaaagcgtgaagatcgacctgttcccggacgaggtctacgtgtttacgcccaaaggccggatcatggagctgcccaagggctccaccgccgtcgactttgcctatgcagtgcacaccgatgtgggcaacagctgcatcgcctgtcggatcaatcgtcgtctcgcaccgctgtccgaaccgctgcaaagtggctccacggtcgagatcgtcagtgctccaggcgcacggccgaacccggcgtggctcaacttcgtggtcaccggcaaggcgcgcacgcacatccgtcacgcgctgaaattgcagcgccgctccgagtccatcagcctgggcgaacgcctgctgaacaaggtgctcaacggtttcgacagcgctctcgacaagatcccgcaggaacgcgtacaagcgatgctccacgagtaccgtcaggaaaccatcgaagacctgctggaagatatcggcctgggcaaccgcatggcctatgtagtcgcccgccgcctgctcggcgaaggcgaacagctgccaagccccgaaggcccgctggcgattcgcggcaccgagggcctggtgctcagctacgccaagtgctgcacgccgatcccaggcgatccgattgtcggccacttgtccgcaggcaaaggcatggtggtgcacctggacaactgccgcaacatcaccgaaatccgccacaacccggaaaaatgcatccagctctcgtgggccaaggatgtcaccggcgaattcaacgtcgagttgcgcgtggagctggaacaccagcgtggcctgatcgccctgctcgccagcagcgtcaacgcagccgacggcaatatcgagaaaatcagcatggacgagcgcgatggccgcatcagcgtggtccaactggtggtcagcgtccacgaccgcgtgcacctggcccgcgtgatcaagaaactgcgtgccttgaccggtgtgatccgcatcactcgcatgcgcgcctaacccacattacaaggagtcattcatgaccaagaccgttatcaccagcgataaagcccctgccgccatcggcacttactcccaggcgatcaaggcgggcaacaccgtctacatgtccggccagatcccgctggacccaaagaccatggaactggtggaaggcttcgaagcacagaccgtacaggtcttcgaaaacctcaagtccgttgctgaagccgccggcggttcgttcaaggacatcgtcaagctgaacatcttcctcaccgacctgagccacttcgccaaggtcaacgagatcatgggcaagtacttcgaacagccgtacccagcccgcgccgccatcggcgttgccgccctgccaaagggtgcacaggttgagatggacgcgatcctggtcatcgagtaaaacacccggcgcagcccccacaggctgcgccgacttcgtttcagaaggatttcatgatgcgcaaagcgcttgtagcctcatcaatgctcgccctgttgctcggcggctgtgccagtaaccctgccgacagggatgtgagcggcacctggatcaaccaggtagccatcgatgcggctgccaagggcggccctttgcgtgaagccttgcagagctttggcccgaacctcgagtgggaggtcaataccaaggccgcgcaggcccgctactacaacggttttgaagtagcggaaggcaagttgctgggtgaacagtccggcgcctggagcgtggatttctacggcagctccgccaccgaactcaagcgcaaaggcaagcaactgctgcaagtggccaatgacaacgagcctgaacagctgtttgcccgcgccaaagaccccgccccggaaggcgcacctttgggcgccaacttcgagcgggcgctgtacgcggcctacctgggcggtgactggaagatcagcgacggcttcggcagcggcgccatcgtgcagttccaggctgacggcaaagtcgccggcctgcctaatgttgaccggtactcgctatgcctggccggtgattgcgcgtcaatgagcggcggctacgacagcatctggctgcaactcaatggccagggcaacccgtggatctttgtgcgcaagggcaagcaactggagattttccaggcggtgaataccgcgcaggccgacgaggtgccctcatttacgccggggcctcggcagtggctactggaaaaacagtgatacaaagcaaaggagcccaagggctcctttttctttagcctgcaccgcgattggcacgactgaagacattgccccatgcgcacactccttatcctcggcctcttgctgctgagcggctgcatccctgcagatatcagtggtgtctggatcaatcagccaatcattgatgtggccgcgcaaggcaaaccgctgaacatccacggtacgcatttggagtggcacatcgacactcgtgctggcaaggcacaggtgcgtaacggctttgagatgagcgaaggccagttactgctcaaatcccccaacgcctggatcgtcgactacggtggcggtcacaccgatgagctgcaatttgatggcaagtatctgacccaggcgaccaaccaatacgccccacaggaagtgttcagccgcccaaccgaaacggtggagacaggggataattgggtcaacaccttcgtgaaagccctgaacacagcgtacatggccggcgaatggaacatcatcgacggccccgggaaaggcacgacggcgatgttcaccgcgcagggtcgcgtttcagggcttgggcaagcagatcgatacacactgtgcctggacggcgactgccgatcccagggtgcgggcaatgaaaccctgctcttaggccatgcaggcaccgacgatacatggatcttcgtgcgcaaaggcaagcaacttgagattttccaggcggtgaataccgcgcaggccgacgaagcaccgcagttcacccccggcccccgccaatggctgctggaaaaacaatagccgccatgccgcaaatccaaatgtgggagggggcttgcccccgatggcagtgcatcagctaatacaactgtggctgacactccgctatcgggggcaagccccctcccacattttttgactgcgtttcagcccttgaggatcgccgcatagccttcgcgataagtcgggtaggtcggcgtccagcccaacgctttcgcccgggcattgctgcactgcttgctgcccgctcgccgcacactggcgtcctcagcccactcggtcaccccaaggtattcgcgcaaccagcccaccacttcggccagtggcgctggcgcatcgtcgacaccgatgtagaccttgtccagcgaaccgccctcttccacatggcgcaataaaaaggccagcagccccgcagcgtcttccgcatgaatgcgattgccatataaaggtggatcgattgcgactcggtagccctggcggacctgggtcagcaaccattcgcgtcccggaccataaatgccggtcaggcgcacgatgctggccgggatgccgctattgagcgccacctgctcagcctccagcatcacctgcccggaataccccttcgcctgagtctccgatgtttcgtcgacccactcgccattctgctgcccgtagacgctgctgctggatacaaacagcaggtgcttgggctcctggccgtagtcgcccaaccactcaagcacatgtttcagcccttctacataagcggcgcgatagccggcttcgtcgtggtccgtcgcagcggcgcagtacaccaggtaatccaccccgccaatcggccaggtgtctgggcaatccttcttgaacaagtcaccggcaatgccgatcacgccctcaggaagccgcgaaatatcgcggcgcaggccatgaacctcccattccgaggcgagcaactggctagccagccgactacccacatcgccacatccggcaatcacaacagaaggcgctgacatcacaaaactccgcgaagaaaggtctaggttagccttcgcagatgacagacggccagaaaaagcacaaataaagttactgtattacttctgttaacaagaattacttgcaataataaccgcccatttgtcctcgcccccagggtctggaaggacgatcactcatttttttactcaggtccggccagcatgacacgtaatacaacccccgcttcgccaaccaagcttcacagcccatcccgcgcctggcgcgcgattgctgcgctgctgttcagcgtactgctggcaccgaccgccgccttcgctgatgccaccgcgccagccaccccggcggccgccgagcacaacactgcggcaccggcagcaccggcagcacctgccgtagcgcccgctgccaccgacccggcccaggctgctgaccctgccgccgacgacagcggtgtggtgctggaagaagacaacaccctgggcatggcccacgacctgtcgccctggggcatgtaccagaacgctgacgtggtggtgaaagccgtgatgatcggcctggccatcgcctcgatcatcacctggaccatctggatcgccaaaggcttcgagctgctgggcgccaagcgtcgcctgcgcaccgaaatcgtccacctgaaaaaggccaccaccctcaaggaagccagcgaaagcgcgaccaaaaagggcaccctggccaataccctggtgcacgacgcgttggaagaaatgcgcctgtcggccaacacccgcgaaaaagaaggcatcaaggaacgtgtggccttccgcctggagcgtctggtggcggcctgcggccgtaacatgagcagcggcaccggcgtgctggcgaccatcggttccaccgcgccgttcgtcggcctgttcggtaccgtgtggggcatcatgaacagcttcatcggcatcgccaaaacccagaccaccaacctcgccgttgttgccccaggcatcgccgaagccctgctggccaccgccctgggcctggttgccgcgattcctgcggtggtgatctacaacgtcttcgcgcgttcgattgccggctataaggcccaggtatcggacgcgtcggcggaagtcctgctgctggtcagccgcgacctcgatcacctgcctaccgagcgcagctcgcaaccgcacatggtgaaagtggggtaatcggccatgggcctgcatttgaatcaaggcgacgacgaactcgtcgagaaccacgaaatcaacgtcacgccgtttatcgacgtgatgctggtgctgctgatcatcttcatggtggcagcaccgttggccaccgtggacatcaaggtcgacctgcccgcgtccagcgccaagccggcgccacggccggagaaaccgatcttcctcagcgtcaaggcggaccaacgcctgttcctgggcgaagaagaggtcaaggctgaaaccctggggccggtgctcgacgccaagacccagggcaagaaggacacgacgatcttcttccaggctgacaagggcgtggactacggcgacctgatgagcgtgatggatgccctgcgggcagccggctacctcaaggtaggcctggtcggacttgagacggcagccaagaaatgatcacgacgcgccacaaactgacgcgttatggcaccagcctcgccgtcgtactgggcgtgcatgccgtcgcgatcgctatcgcgcttcattggtcggcgccgcgcacggtgcagttgccaccggctgccatggtcatcgacctggcaccgatgccagccccaccgccgccggcaccgcccaaggtggtcacgccgccgcaaccgcctgccccggtggaagaactgccgctgccgaaactggccgaggcacccaagccgacgatccaggtgcccaagccggtcaagcccaagcccaaaccgcagccgcccaagcctgtggagaagaagatcgagccgcccaaggagaaaccttccgaggacccgccgagcgatgctccgccgacccaggcaccggctgaaaaatcggcccagcccgttcctggcccgtcgccgcaacagatcgccgccaaggcgtcctgggaaggcaccctgctggcccacctgcagaagtacaagaagtacccgccaggcgcccaggcgcgtggcaaggaaggcctcaaccgcttgaagttcgtggtggatgccgagggtaacgtgctgtcctacgagttggtgggccgctccggcaacgccgacctggaccgcgccacgctggacatgatccgtcgtgcccagccgctgcccaagccaccggcagacatgctcaagggtggcagcatcgagatcgttgcaccgttcgtgtacaacatcgaaaaacgtcgtcgctgagccgctcccaatgggcaccctcgggtgcccattgcgctccccctccccggtatttcaagccttgcaaacccgcgagctgaaccgttactgaacgtgaaaccaatgtcatggttcttcacttgtaacacttcaatacaccaccaatcatgcgcgaataattctcatttgagaggcttttcgccatgtcctgccctccccgcctgacgcttgccctgctcgcaatcgctggcgccccctgcgcagcccatgcggatcaactggtcagcctgaccgtgcaaaaccacaccttcacacccgccagcttcaccgtgccggctggggagcgctttcgcatccagctcaccaacaacgacgacaccgtcgacgaattcgaaagctacgacatgaaattcgaaaagatcgtcgtgcccggcaacaccattaccgtcttcgccggcccgatgcatccgggcacctacagctttttcgacgactaccaccccgaccaggccaaaggcaccgtcaccgtcgtcgcggccaaggagtaagtcatgctggcctgtctgctgatcgtgtttcgtgaagtcctggaagccggcatcgtcatcggtatcgtcatggccgccacccaggggctggcgcggcgcagtgcctacatcatcggcggcatcgctgccggtgttggcggcgcggcgatcctcgcgctgttcactggcgccatcacccaggccctggacggtttcggccaggaaatcttcaacgccaccatccttatcgtcgcggtgtgcatgctcggctggcacaacctgtggatgagtagccatggccgcgaactcgctactcaactgcgcgaaagcggggcggcggtgcaacgcggcgaaaagaccctgtgggcactggccatcgtgatcaccgtggccgtgctgcgcgaaggctcggaaatcgtgctgttcctgtatggcatcgccgcctccacccacaccgaacccctgacgatgttcatcggcggcgtgctcgggattgccggcggcggcgtgctgtcgtggctgctgtatcgcgggctggtggtgatcagcctcaagcgcctgttctcggtcaccacctggatgatcgccgtactcgcggcgggaatggccggccgcgccgccgcgatcctggccggtatcaacctgatcccggcctggggctacgagttgtgggacacctcttggctagtctccgacgcaagcctcaccggtagggcgctgcaagcgctgactggctacaccgaccgccccctgggcgttcaactgtttgcctgggtggccacccttaccctgctgctactgggtagccgccttgtgcagtcgcgcaccactcaaccgtcttcatccaccctggagcgtcacccatgaaccacctgtccaaacccgtggccgctgcgctggtcctgaccagtgccctggctttttccgccgtcagccaagcccgtgaatacccgatcggcgggccggttcagacccacgacatggagatcgcctcctcgtacctcaccgggatcgagatggcgccaatgccaccaggcatggtcatggacaaggactcggtgcaccttgaaaccgatgtgcatgccaccgccgacaacaagtacggactgtccaacggtgaatgggtgccttacctgagcatctcctattccctggtcaaggaaggcgctccggactacaaacaaatcggcacgctcctgccgatggttgccaaagacggcgcccactatgcgaacaacgtgaagatggacggccccggcacctataccgtggtcctgcgctatgagagcccgcagatcaatggcttcttccaccacgtcgacaaagaaaccggcgtccccgaatggtggggcccgttcaccgagaccttcaccttcaaatacccgcagaaataaccggcaaaacacctgcggcacccgattagctggtgtcgcaaaccccatcgtgtctgataacgtgcgtctatcgattgcagccggtatgcttggcccgcaacctcatggacgcccgctatgactcttacagaattgcgctacatcgtcaccctcgcccaagagcagcacttcggccacgcggccgagcgttgccatgtcagccaaccgacgctgtcggtgggcgtgaaaaagcttgaagacgaactcggtgtgctgattttcgagcgcagcaagagcgccgtgcgcctcaccccggtgggcgaaggcatcgtggcccaggcccagaaggtgctggagcaggcgcagagcattcgcgaactggcccaggccggcaagaaccagctgaccgcgccgctcaaggtcggcgccatctacaccgtcggcccgtacctgtttccgcacctgatcccgcaactgcaccgcgtcgcgccgcagatgccgctgtatatcgaagaaaatttcacccacgtgttgcgtgacaaactgcgcaacggcgagctggacgcgatcatcatcgccctgccgttcaatgaagccgacgtgctgaccctgccgctctacgacgagccgttctacgtgctgatgccggcctcgcacccgtggacccagaaagacaccatcgacgccggcctgctcaacgacaagagcctgctgttgctcggtgaagggcactgcttccgcgaccaggtcctcgaagcctgcccgaccctgaccaagggcaatgacggcgccaagcacaccaccgtggaatccagctccctggaaaccatccgccacatggtcgcgtccggcctgggcatttccatcctgccgctgtcagcggtggacagccatcactacgcccccggcgtgatcgaagtgcgccccctcacgccgccggtgccgttccgcaccgtggcgatcgcctggcgcgccagcttcccacggcccaaagcgattgagatcctcgccgactcgatccgcctgtgttcggtcgccaagccgactgccgcgagctaagccagggtatgactgagctgtcgcaggtgtcggtgacggcactcaagggtgtcggtgaagccatggccgagaagctggccaaggtgggcctggagaacctccaggacgtgctgttccatctgcccctgcgctatcaggaccgcacccgcgtagtgcccatcggccagttgcgccccgggcaggacgcagtggtcgaaggcaccgtcagcggtgccgatgtggtgatgggcaagcgccgcagtctggtcgtacgcctgcaggatggcactggcggcctgagcctgcgcttctaccatttcagcaacgcgcagaaggaaggcctcaagcgcggcacccgcgtgcgctgctacggcgaagcgcgacccggcgcatccggccttgagatctatcacccggaataccgcgccattaccggtgacgaaccgccgccggtcgacaccacgctcacgccgatctacccgctcaccgaaggcctgacccagcaacgcctgcgccaactgtgcatgcagacgctgaccatgctcggtccgaaaagcctgcctgattggctgccccaggaactggcccgcgactatcaactggcgccgctggacgatgcaatccgctacctgcatcacccgcccgccgacgccgatgtcgacgaactcgcactcggtcatcactgggcccagcaccgtctggcctttgaagaactgctgacccaccaattgtcgcagcaacgcctgcgcgaaagcatgcgctccctgcgtgcaccggcaatgcccaaggccacgcgcctgcccgcgcagtacctggccaacctcggttttgcgccgaccggtgcccagcaacgcgtcggcaatgaaatcgcctatgacctgagccagcaagagcccatgctgcggctgatccagggcgatgtgggcgcaggcaagaccgtggtcgccgccctcgccgccctgcaagcactggaagccggctaccaggtggcgctgatggcgcccaccgagatcctcgccgagcagcacttcatcaccttcaagcgctggctcgaaccgctgggcctggaagtcgcgtggctggccggcaagctcaagggcaagaaccgcgcggcggcactggaacagatcgctggcggcgccccgatggtggtgggcacccacgcgctgttccaggacgaagtgcagttcaagaacctggcgctggtgatcatcgacgaacagcaccgcttcggcgtgcaacagcgcctggccctgcgccagaaaggcgtgggcgggcggatgaacccgcaccagttgatcatgaccgccacaccgattccgcgcaccctggccatgagcgcctacgccgacctcgacacctcgatcctcgacgaactgccgcctggccgtacgccggtcaacaccgtgctggtcaccgacacccggcgcgtggaagtgatcgaacgcgtacgcggcgcctgtgccgaagggcgccaggcgtactgggtgtgcacgctgatcgaagagtccgaagagctgacctgccaagcggccgaaaccacttacgaagacctcaccagcgccctcggcgaactcaaggtcgggctgatccacgggcgtatgaaaccggctgaaaaggccgcagtgatggccgagttcaaggccggcaacctgcaactgctggtcgccaccacggtgattgaagtgggcgtggacgtgcccaacgccagcctgatgatcatcgaaaaccccgagcgcctgggcctggcgcaactgcaccagttgcgtggccgtgtgggccgaggcagcgccgccagccactgcgtgctgctctaccacccgccgctgtcacagatcggccgccagcgcctgggcatcatgcgtgaaaccaacgacggttttgtcatcgccgaaaaagacctggaactgcgcggccccggcgaaatgctcggcacccgtcagaccggcctgctgcaattcaaagtcgccgacctgatgcgcgacgccgacctgctgccagccgtgcgcgatgcggcgcaggcgctgctggagcgctggccggatcacgtcagcccgctgctcaatcgctggctcaggcatgggcagcaatacggccaagtgtgacgcctgacgcacttaagcgaccaacagttgtatcaagctggttatacttcgtggactgtaagaaattggatcaggccatgtcagaagttgccctcgccacagccccactgaccgccccgccggtcattcgggctctgctcgccaaactcgtcatcccctacacggaagtcgccgacctcccgggcctgaatcctgcgcagaaggtccaggcggtgctgttggaagacgcggtgggcgccctgatggtgctgtttccgcagaaccagttgctcgacctcaaccgccttgccgaactcaccggtcgtcgcctgaccgctgtgtcgccggatcgcgtcaagcgcatgctcgacaaacatgacctgagcctgctgcctggtctgccaccccttaccagttcgccctgcctgtacgaaggcagcctgctcaacgagccgagcctgctggtgcattcgggtgaagccgggctgctgctcgacattgacaccaacgccttcaagaccctgctcaccaaggccagcgccgggcacttcggcgagccgctgagcaatatccgccccaacctcgaccgccccaatgacgaccgcgaggaaatcacccaggcgatgcaggcgttcaccgcccgccgtatccagcaacgcctggaagcgaccatcgagattccaccgctggccgataccgcacagaagatcatcaagctgcgcgtcgacccaaacgccaccatcgatgacatcaccggcgtggtcgagaccgacccggccctggccgcccaagtggtgagctgggcagcgtcgccgtactacgcctcgccgggcaagattcgttcagtggaagacgccatcgtgcgtgtgctgggcttcgacctagtgatcaacctggcgctgggcctggccctgggcaagaccctgagcctgcccaaggaccacccgcaccagtcgacgccgtactggcaccagtcgatctacaccgccgccgtgatcgaaggcctgacccgcgccatgccccgcgcccagcgcccggaagccggcctgacctacctcgccggcttgctgcacaacttcggctacctgttgctggcccacgtgttcccgccgcacttctcgctgatctgccgccacctggaggtcaacccgcacctgtgccacagctatgtcgagcaacacctgctgggcattagccgcgagcagatcggcgcctggctgatgcgctactgggacatgccggacgaactgtccaccgccctgcgcttccagcacgacccgacctacgatgggcaatacgccgagtacccgaacctggtgtgcctggccgtgcgcctgttgcgtagccgcggaatcggctccgggccggacgaggcgattccggatgcgctgctcgagcgcctgggcttgagccgtgacaaggctgaagaggtggtgggcaaagtgcttgatgctgaagtgctgttgcgcgaattggcgtcgcagttcagccagggctaaatcgatagcctgtcagaccgctatcggggggcaagccccctcccacacttgaaatgcattcccctgtgggagggggcttgcccccgatgaatccacctcggtctacttctttttcttcggcttcaaatacttggtcaacccctggaaccagatcaccagcgccgggttgcccttgatctggatcgacttgtcctgaatccccgtcatgaacgccaattgcttgttcttcgcctgcatcgtggcgaagccgtaggcggcatctttgaacgcaatggcaaacgccggcgccgggtgcacacccgagcggctggtgatgcgctggtctttgacgatgaagtgacgggcaaccttgccgtcgagggtctgcagctggaacgccaggtctttatcgcccaactgttgctggaaggcaggattggtgcggctggctttgcccatcatcaagcccaacacccacaggagaagacggaatttcatgactacgcagcctcgttgaattaaacagcaggcgcagtttatcgattcccgcctagaacaccaacgaagtttcgtagcactaagaggtagacattcgctgcaggcctaatgaccaagcagtcacatcttaaacgctcgaccgacattcaaagacatgatgatttatcctgttttttgaactagcgcatattcaaaatcattctaaataactgtcaaaactcacagttatgccacaaccaaacacgccatagagtttaccaagacgtcaatcaaacaccattgattacgcgaacaaacttgaggtgtccctcgtgaaagcatttgccaactgcccaaaattcattcgtaacggccctacaacgccaaacagcacaggctacctgaaaaccgacatttcaatgttgccccttcccccgtttaatacgttcaaagccaccaaagacttgaccatgcggtttaatggagatcatctcgaagtcgttgcaaccgttgatatgtatccccacttgcgcttctacatttacatacacaaagaggacttacacaatgaagggacgttaccgatagatccctctggtctccccggcacagcctatgcgggttttattgccgataagctatacgacggaaccaaaggggaactttcgttctgctaccacggccgagaaggacgactcgatgccacgctgcactttgaggcagccccctatgggttcagcgatggagtcgttgaggtaacaggtctggaacctcccgttaaatagagttaaccagcctacgtagaacgccagtcagtaaaaccagctgacgttctacggttgaccacagcgtcttacttaaacattagggcaaggaaccggcgcccagtcggccaggttcggatcgcggcagctaccttcgagctgagctttgccggcgctggcgacctgcttgctttcagcctgcttggcctgcacggtctggatgctcttctcggtggtgacggcttctttcggcacgactggcagagccggctttttcgcaaccttgaccggcttcttgcccttggccggagcggccacaggtgcggtgtcggcggtcgccacggtcactacgtcattacgctgcacgcccacctgttgcaggtctttctcgtaagcctgggtgtagttgttcaggtcttcgctggccttgccgttgaccgcaacgatcaggtcattggactccttcaggcccgccacgatttccgccaggcgcttgcggccttcggtgtcgttgacggtcttggccttgcggtcggccaccagcttggtgaacgcgctctggtagcactgttgcgatgccttggcgtaggcggtgctgcgatcgatgtcggaggcgcttttgttgaagtcggtggagtacgacgcgatgcgctggttgtcatcggcgatctgcttctgacgctcggtgtagtaacccgccgcgccgccggccagggcgccgcccgctgcgccgatggcggcgttacggccacgcttgtcggagtcgccggtcagcgcaccgagcaatgcaccaccggcagcgccgatggccgcgccggtcacgaccgacttggtcatgttcgagtcggtggcgcgcaagtgctgcaccggctcgtagcagttggggtagtactcgaccttggtgctcgacgcgaccttggaggccggcgacgtggcgcaaccggtcagcacagtgctgaaaccggccgcgatcagcagcaagtgacgcttggaaaccgccttacgggaaaaaagcataggtgtgttctcttttaagtttgacttgcccagcacggccaccgccgcctgagtcccttccaagctcgctatacagccagcgctcatcgctgaccgctcgctgcgagcaattccttcaagatcgttgccgggtcggcccgctgttgcttgcggtagttgccgacatggcgaacgaacagtgttgcgcgcgtcaccaggctcttgccgagcaccggcttgcgatccaactcttccttgatccgttgaaactgcgcctggatcaccgcatcggtgtaacgcgtgccggtggccaggttgtcgatatagatcgccaccgcgccatcgagggcgctgcggccattggcaatggccatgtcgaacagttgcgcgctggccgcgtccttgttgtccagggcctgctggcgactcttctgcaggttggccaggcggatgttgtagttggcgatggtctcggccaccagcgcggccgactgaatcaggttgcccgccgcttcttcgcgctgctgggcgatcagcgagacgttgcgcttgagctcttcattgaccagccccagttcggcttgcagcttggggtcgacgctggcggcgatgatgctgtccaggcgcttggtcgggtcctgggcgtcgtcgatggcatcagtcagcgcggccaggcggccctctttctgccactgggcgaacagctccttgtagcgtgaacgcggtgccgacagcgcaccgatcgccacgcggaaaccggtggtctcgttgctctgctcggtgccatctgcggcgaacagtgggtattcgcggcgcatgccggtgaacagcgtgccctcgccttccaggtagttgccgcctttgaccacaaagccaccgtaggtgccctggcgacgcccggcgtggaccagttggaacgattcctggaccatttccgcggcgttgccgatcacgtcgaacagaccgatggggttgggcaatttggtgccgatgggcatcaggcgcgcagcctgcccggtgccgcccgccacctggttgaacaccgcgtagtcgccgagcgggccgtcgctgtcgctgccttcgacacggcgcgggaacaggcgcccttccaggtcctggcggctcacggcgtgaccgccgcgtgcggcaaattcccactccacttcggtagggaggcgcacaaagcccaggccgccatcatccgccgaggagccacgaccactcaccggcagcaagtctcggtggtatttcatcaaccaggcgctgtacaccgccgagaagcgttcagcctcaaagcgcgacagtttcaccttgggtaagcgcccggccatgccggtcggtacatcgcacgccggtgcaggctcgccgctggccagcgactgcgcctgggacatcacctgggcgtactggcgtgcggtcacttcgtacttgccgatgaagtacagcatgggcttgagtggggtcttggcgtcggtcttcggcatcaagggcgcgatgactttgttccagtccttgggcaggtccttgagggtgaactggccgttgatgaagtcgcggcggtagccggaaataaacgattgctggtaacccgcctcgccttcggcaaaggggtagccgaggctgatctcgcggtcatccagggtgccttgggccagcacgtaggcgtagcggaacagcatgttgccttcgcagggcagcggtaggctgacatcgccttccaacggcttggggttgtcgagcttgtcactcgcctcatcggcccaggccatcgaggccagggtcagcgccatacaggcgcccagtaacttatacatctctgattccttcagaagcctggacccgcgccactcgccaaccaccacacgccgccgccacggcgctgacgccgaggactgcgaccagggccaggccgtaatggcgcgccagcaggtggctggcgaattcgcccggcacctgcacgaataattcattcaagcccgcctcggccagcccatacagcccggcactgagtacggcagcaaaacccgcgctgtacagcgcctgtaccaccacgaacaacagcagcccaccggtggaaaaccccagcaggcgcaacaccgacaactcccgccgcttgcgcgccacagcggccagggcgccggcaaaaatcgccgcaaacgcccccgccaacgccaacccgcagatcacccagaacacgatcgacaggttgcggctcaacgactgcacctgcgcgatggtctgcgcctgggtcgacaccaacaggttctgcccggcgaagtacacccgcagcggctccacatcggtgaggttgcgggcgtacaggcggaacgccgggtacacgcgctgctcactcacacccacggcctccccgtcccaacccaacgccggcactgcgcggccatcgcggtaatcttccgccgcttccagcaaccccaggtcggcaaacaaaccgtcacgggcaaaggcttccagcggcaacaccgccagcacctgcacccgcgtgcgctgggcttcgacgcgcccggccacttgccgtgcaaagctggtttccagccaatcgccaggccgcgccgcgagcttttcggcggcggtgtggctcagcacgatctggtccaggcccttgggcaccggcaggccggccagcagtgggtcacccgacgcggtcggcagcatctccagggccaacgtgcccacttgcgccgtcgccgcaatctgccgcgtacgcggtatggcgaacgccacctcaccgcgctcgcccagttgctcgataaatgccctgctgaatcgaccaccgcccagcggaataatttcacgggtggcggggtcggtctgcaaacgttcggtcaaactgctaaccagtccaaacttcaggccgaataacaccagcagcggcgcgatcaccgccaccagcgccagcaccgaacaggccgacagccaggcgtcattgcggtaatcctgccaggccagcgacgccaccagaccgatgcgcatcagcacacctccccgagggtggcggtgacgccgccatcggtgtcgcgacggcaactgatgcgccgcacctgcaagccactggcgcgggccaggggctcgtcatgggtggcgatcacacaggccgcacggtgttcacgggcctgggccagcaatgcctgcatcacgcgctcggcattcaacgggtcgagggacgccgtcggttcgtccgccagcaccagttgcggcgcatgggccagggcacgggcgcagctgacacgctggcgctgccccaccgacagcgccgccggcttcttggccaactggtcgctgatctccaactgctcggccaggcgcgtcacgctgccatcgtccttcaaacccagcagttgccgggacagggcgatattcccgcgcacatcaagaaagcccagcaggccgccggtttgcagcacatagcccaagtgctggctgcgcagcgcggccaggctggattgccgatcggcgcgccacagcccggcgatgtcctgttgatgaaattcaaactgccccacctgatccggcgccaacaccagcgccagcagatcgagcaaggtgcttttaccgcaaccgctgggcccgacaatcgccacttgctcacccgcacgcagcgccagcgccgggatcaccaggctatagcgctggctgccgacgccccggctcttgtgcaccgcattcaggttcagcatcacggcaacgtcgacaatggcacgcggtacaacgcgtcgcccggctcggcatcgccgaagcggacccagttggccaggtcattgtggaaggtttcgtagaggcggattttcgagtccagctcgtcgataaagtcttcctgctcggccacgctcaacgacaaccacaaatcctgggtcatgttcagcgacttgctgcggtacggcaggccttcgaggtattcgccgagaacgccgccgtcagccaggttgccgcccttgcgcagggcctgcgggtcgcggctcatgtaggccgaggcgctggcgatttcctggaagaagtctttcggtgaggtctgggtcttgcgcgccgcgtcgacgatcagtttcagcgactgctgcaggtcgttgagctgcaacttggtcagcatcacgcacacctggaacgccggcagcgccggattggtcaggtcgcggtcggcggtccaggcgctgaccagctgcggcgcctggctcgcggttttgcgaccgaggaaatccatgtgcatggcatagccgaccgctgcagacttgtccgccaggctcggtgcgctgttcagcaacggcaccggctgcggcgtgttgctgcgcacctggtgcaccaggttggcgaacaccgtgccgatctcatccacccgctcgccgagcttgcgcacatcgccaccgggcaccgccgtgtacaggtcgccaatctgtgggttggcgtcggcggtgaggatgcggtactggctctcggcgccggcgtgggttttcttgccggcgtcggtgcgcaggtgcaaggcgtagatcttgatctgcttgcccagcgcggcctggcgcacttcggcttcgttcatctgggtagcggcgaacgggtcgttcttgcgcagcgcgccggcgtcggtgacgagcaggatgatgcgcccgccataaccggaccaatccatgccgtccaccgcctgcatcaccccggcgaacgcatcttcgttgaaggagtggctggacacggtggatgccttgacctggcgcgccatgtcgaggaagcgttgcgggtcgcggccctgatcgaggctgatcagggtcttggccacgtattccaggcccggggttttcttgatgctgctgcgaaaaccgaccatgccgaagctgacactgtccaactcgccgcgctcggcgatgcgggtttgcagctcgtgcaccacgtcgcggatctggtcgatatagggctgcatcgacacggtggtgtccaccaccagcaccaccgccgtgcggaaggcgtcggcgttggcattcatcaccggggtcgcgggcttggctgccgcgctgctgccggggtcgatggaagccacattgagcaactgcaccggttggccgttttcgtcgaagctttctttggagtcgaagatcggcaacaggtagaactggttctgcgggacggcgctggcggcgggctccaacgccaggatctggctgttgtcttcgctgtttttctgcgccttggccagcacgcctttggcggccgaagggtcagccaggagtttttccacttcgccggattggcgcaggaacatcaccggtgcccggcccgagcgctcggtgaatttcagcaccaggctctgcttccagtcgctgacttgagacgcaggcaaccaaccgtcgctgcgcccatcggtggcggcgccgacacgcacccacgggctgccgtcgacgtccttgcgctggtacacatagagcacggaaaacgccggcagggccttgcctggcgcgctgcccgcatcggtggaaagctttgcgcccggcttgctgagcacgcgctggaacagggtcttcttgcccgccatcaacagcggacgctggccgccgtccacttcggcgaccgctggcggcggtggggtgacgttcggtacctgggcagcgggcggtttagctaccggctcgtcactgccgctcaaccaccagtaactcgcaccgccaatcgccagtgccaccgccaccgcaaccgccgccagcgccaacaccggcccacggcgctgctcgctgtgctgggtcggcggcaccaccggttggcgcaccggctggggtttctcgctgggaatctcgatggattccggggtgatgcccgccaggtcgaaactcatcggaatcggcagcggccgcaccagcgtggcttccggcgagtccgccggcaggttatccaaggcccgcaacagcgccgcggcgtccgggaaacgctcagccgggtccttggccaacagcttgcgcagcacgtcctgataacggccatggtgcaccggcagttccggcagcggttcggtcaggtgcgccagcgccgtggagagcgcatcggtgccggtgtaaggcagcttgccgaccagaatctcgtacagcaccacgcccagcgcatacaggtcggcgcggccgtcgatctcctggccccgcgcctgttccgggctcatgtagctgggggtgcccacggcaaacccggcctgggtgaattgcgtgcggtcatccagtgacttggcgatgccgaagtcggacagcaccgccgtgccatcggcgcggaacagaatgttcgccggttttacatcgcggtgcaccaggccctgggcgtgggcatagcccagcgccgaggcgatctggcggatcagcgtcacgccctgctccggcgtcatgccggcggcgatgcgctccttgagcgtgccgttgggcaggtattccatggccatgtagtacagctcaccgacattgccgatgtcatggatggtcaccgtgtgcgggtgcgacaaccgcgccagggtcttgccctcgcgcaggaagcgctcgcagaaggttggatcggccgccagcgccgccgccatcaccttcaatgccaccttgcgctccagcgagcgctgggtcgccaggtacacgctggccatggcgccttcgccgatctcgccttcgatgtcataaccggggatgacgatgttcatggcgataccttcacgacaatggcggtgatgttgtccggcgcgccccggttgagccccaggtgcacgaggctgcgcacgatttcatccggcgcgtcgtggctgagcacttcgcggatttcatggtcttcgacggttttgttcaggccatcgctgcacagcaggtaactatcgccgggggcgatcagcaggtcgaccaccgccagctccaggtgggcttccacgccaatcgcgcgggtgacgatgttggcgcgcgggtgcgtacgcgcgtcggcttcgctgagcaggccgctgtcttgcaggtcctggacgtagctgtggtcgcgggagatgccttcgagcgcgccgtcgcgcaggcggtacaagcgactgtcgccggcccacaggcacacaccgcgcaggccacgggcggccaacaccaccacggtgctgcccatcatggtcacgccacggttggcggtttcttcgcgcacggctgcgttgatgcgctgcaggtcgttgcgcaacgctgccgtgtattcatccagcgaacgccccaccggcacgctgcgcaagctgtcgacgatcaggctgctgacatagtcgcccgccgcgtgcccgcccataccgtcggccaccacccacaggcggttttccggcaggtccaggcaggcgtcttcgttgacctggcggaccatgcccacatggcttttgctcgcggatttgtacgtcgaccccatctacaccacaccttcttgtccgagcaaaaactgcgcaaaatcgctggcgacaggcaggccctgacaccgcagcaaaccaggggaaatacgttgcgaaccacgcccccaccacaggctggcgccttcgcaggcctgttcggccagggccgtcatgcgctgctgcggcacggtcgcggccacccgttgcaggccggcgaaacgactgtccacggcacgcggctcgctcgccggcaagcccaggttgtcgaggccgtggttgaaactttcaaaggtggcgccggcatccagggtgctgagcaacagttcttcggcctgctcgaaccagttgtccgggccgcccaccagagaggccggattggtgtcgtggtcgagcaacaccaccaccgccagcgggaagtagcgccccacccggtcgatgctcggcattaccacgcccgccgccgcatccggcccgcacacgcccggcgccagcacaaagcgccacagcgggctgaccaggtaagtattgagccattcaccgccgaggctgttctgactggccagcaaacccgccgccagccagctgtcccacgggccgataaagctctggggcaaggcgcggctgacaaagtcgccacggctggccaacttgccgtagaagcccagcgtcgtcatagccgctccggcaggctgaagccactgagcacgcggctcttgaacgggttgaaggcgctgttggcgcgcaactcgtaggcaatgctcgcaccgtcgacgcgcaggcgcaggttgaagcggtccggcgaattaccggcggtgaggtccgactgttccagcaagcggaaccaggcccacggcccgtccagggtcacgccggaacggccgctggcggcgggcggcatgatcgaaatgcgcaccacgccaatgctgccggggttcggccattgcatcgccaccgggcggctggggccgtggtcgtagctcagctgctggccgtccaggtccagcaggaactgggtgatggtcgggtccatcgacaccggtttgagttcgaaacgcacgatgggttgagtcccccccgcgcggaagaacgcatcgcggatcgtcgcggcacgctggaaggtctgcagcacgcccggagcaatccccagcttctgcgccgcgcccggctgccaacgccaggtctgcgcggacgtatcgacgtaaggctgcaggtatttgcggaagtagttgtccatcaccccgcccacgccgaagaattggccgaagtcatccagggtggcgtcccgtgcactgcccggcgacatcgggtagcgcccggccagggactgacgatacacgttgaccacttcgctgacccaggcggcgttcaattggttgcgcacgccgcccatcatgctgttggtggtggagttgaccaccgacttgaccatgccctgcaccagcggtggctggcgctcggcattcaggctgactcgcgtggccgcagccgccgcctggttcttcgcctcgccgagcaacgcatcgccgctggcgccgaccatggcgctgacctgcacatacagcgcgttcatgtcggtgagcaggccgtcgatggccgccggttcgccttcgttcttgctgacgatgctgttgagctgggcgaagtgcgcggtcaccgggtcctccgccgccgcaggcgcattggcagtcggttgttcctggccgagcaggctgcccaggcgctccttgagcttgtcgacgccgccttccactggcacgcccttggcggccaactggcgttcttcggcttgcaggtcggtttccttggccaccgccaccagcagttttttcagaggcgaggtcggcccggaaatcacccgcagcacatcagccgcctgggccacgctggtgatcggcacaaagtcgatgtccgccagcaacgcatcccactggcgctggtagtcctggaaatacaggcgccgcacatcggcggccaggctcaccacgttctgctggtcggcctgttcctggcccaacacccactgctcttcagcgagggtgccagtctggttcagactgctcagcaggaacgcctggcgatagcccttggcggtgaagaacccactcaacggctcgcccagcggcttgccgcttttgcggctgaacaccagcgcggcgtcacggccagcggcttcgttgaggcgaaagtccgggataccctcgggcagtttctggcgcttgacccggtcatatacgcgctgggccaccggcagttgttgcaactggcggcgcaggtcgtcgatcagccgctgatccaggcgcgcgttcggcgggtggcgttcgaacagcgactgcaagtgcccggccaatgcctggcgctgatccgccggcaggtcgcggggcaggttgcggtcccagtccagggcgatccaggccttgatgaagtccgggtcgtaatgctcggcgtcagccagcatcaggtaggccttgaggccttcgtagaggaagtcggaattgccgccgccgtgcagttgttcttcgatgcgcgtcaccaggcgtggcgcgaacaccgcgatcagcagcttgcggtagacgctggcagactcggcttcaagcatatcgccctgatacagcccgaggccttcggaccagctcggcgaatcgcccgccaggtttttcacggcgttgagcaacggcagcacggcgagcacttcgcgctgcgccgggctcaggttctgcacggcctggcccagcggcgcgaccttctggtcgacctgggcgatgtaggcctggttggcgcgataactcacccaccacaaaccgctgaccaccacgaccaacgccacagtggcggccaacacaccccgcgcaatccacttgcgccgacgctcgaccttcgggttcacccccaccaggccacgctcggcaaacgccacggcggtgaagagtttttcgatgaagtagctgcgcccggtgccgctctggcgcgccaaatgctggcggtccaggttcatgctctgggccatggcgccgatcaggcggtcaatcgggctgccttcctgggtgccgctggtgaagtacacgccgcgcagcaacacgcgctcttcaaaggcattgggtttgaacacgccttcgaggaagctttgcaaacaatccttcaaggcgccgaactgctgcgggaagccatagatcaggtcgcgccgcgccgggtcgcgttcctgttgcaggcgttcgaccaggcgctcattgaggcgctgttccagcccggcgaactcgctttgcaggtgtgccaatgggctgtcgctgtttttgccatcgtccagggcaaaggtcatgccccacacctgggcgcgctcttccttgctcaggttatcgaagaactccatgaagcccggcaccaggtcgagcttggtcagcatcaggtagatcgggaagcgcacgcccagttgggtgtacagctcctggatacgcaggcggatggcagcggcgtgggcggcgcgctcggcgtcggtgcccagcaacaggtccgacaggctgatggcaatgaacgcaccatcgatggggcgacgtgagcgctgttttttcagcaggtcgaggaagcccagccaggcggccttatcgaccgtggagttgctatcctgggtggtgtagcggccggcggtgtcgagcagcacggcttgatcggtaaaccaccagtcgcagttgcgcgtaccgccaacgccacgcaccgcaccggcgcccaactgcgccgccagcggaaaatgcagcccggagttgaccagcgcggtggtcttgcccgaacccggcgggccgatgatcacgtaccacggcaactcgtagaggttgcggcgctcatcgccaccgagcttggcctttttcagcagggccagggcctcgtccatgcgctggcgcagggtggtgagctcttcggcggtggcgacgctgttggggtcggccggggtttcggcggccaggctgcgcatcacttcagcggcctgacggcgggcctggataatgcggaacacgcggtaggccagccacaccgcgaacaccaggatgatcaacgcccagcgccggccttctggtaccagcacgtcgagcaacggcccgacaaaccagatgatcaggctcagggcgatcaaacccagcacggggatcacccagcgaatcatgaaactgaaaaacgccttcactcgacgccctccgccaatacggtgatttcaacccgacgattgcgggcacggccttcggcggtggcgttggtcgccaccggctcggtgtcgctgcgcccttcggcactgaagcgctcggcctggccggtcttggccgccaggatctccagcaccgacttggcccgcgcttcggacagcgcccagttggacgggaagcgcaacgtggcaatcgggcggttgtcgctgtgcccggtcacccgcacctggcccttgaccttgcggatggcgtcggcgatgcgcagcatcagcggctggtagtcatcgacgatgctggaactggcggacgcaaacagctcgtcgccgcgaatggtcaccacggagcggtcgaccgcatcttccactgccacgcggccggccttgatgtcttccaccaggaagccagccaggcgcggacgctcgatgactttgggctgcgccaccggacgatcgatggcctgcaccgggatctcgcccagggcatggatattcttgaacaccggctcggcatccgacgccagcttcatgcgcaagccaaacagcaacgccagtaacaacgccaagccgatggccacggcgatccacggcggcatgaattgcgccaggcggtcgcgggccacggtcacgccgcgccagtgcggcgacagctcacgctcatgctcgccacgcgcactgcgaatggctgcagcagtgcgttcgcgcagggtctccagctggctgcgaccgtcgttcatcacgcggtagcggccttcgaaccccaggcacatgcacaggtacaacagctccagcagatacagacgttcccgtgggctttgcaggcagtggtccaacagttggaagaccttttcgccgccccaggcttcgttgtgcacggtgatcagcaggctctgtttgccccagtcgctggtactgccccagggcgtgctcaataccgcttcatccagcgcggtgcacagcgcgtaacgcgccagcagcacttcgttacgggcgatgccagcggcttcggcacgctcttcgaactggcgcaggtaggccaacagctgtgcgcgcaggctggccggcgccgggtgggcgatggtgttgcgcaggcgcgtcagcagcgccagcaaagggccggcggcgctttccagcgggttgaggccgtggctcttgccggtgagcatcggcgcggccggcatggccagcggcgaaggttcggcacgcacaggttccggcgcccggccacccggacgcggcatgaactgggtgcggtcatcatcattgggatgcatcgcggattatcctcggatcgcccagaaggccaggttcaaacccgggaactgcccggcgatatggaaggcgaagccgccggaattgcccagctgttgccaggcctcgctgccgcgatccagctcgtaataggtcgaacctgcgtgatacggcaattggcgcggcgccactggcagcggcaacaggctgatgcccggcagttgcaggttgaccaggtcgcggatgtgctccaccgagccgactttgctctgctggccgaagcgtgcgcgcagggtttcgccgggcacatcggcgcgcaccaccaggatgaaactggcgttgtcgagcagggtcttgtcggccagcatcgccacgtgcacgccgtaggctttctcgacaatcgggattggcgtggccttgctgtcgatcagcatcgacagcgcttcgcgcaatgccgccatcaccggcgcgaagctcagggccaggtcgtcgtgctggtactgcgggtattcctgggggcgacggccggaggtggagaaggtcgagaactcgccggccaggctgaccagctcgctgaagaagcgctccgggtgcaacgggctcaactggctcaaatgctggaccagcggttgggcacggttgaccagttgcagcagcatgaagtcggcaatctccgacgcgccaccggcgcccgatgccaccacccgccccgccagagcttcgccgcgctggtgcagcaggccgagcagttcgctgcgaaaggcggtgagcggtttgctcgcggccacatccaataccggcgggatgtaggtgtcatcgagcaccaatgcgcggtcggcacgtttttccttgatgcgcaccaggcccacggcggcgtaatcgctgatgccatcctgggcggtgagcaggcgcagggcgcgggaacccacggccaccggggcgcggttttcgaagggtgcgttgtcatcgcgcacttcgcgcacctggctcacataacgcgcagcctccagggcttcgccttcatccacggtatcgcgggcgccggcgcgcttgagcggcagggccaggtacaccaggccgtcgcgcaggttgtcgtcgatgttcagcgggcttggtgccaggtcatcctgggggatattgaacggcgtaccgtcgggcaacaggccacgcgccgatacgatcgccagcttgccctgggccagcaggccctggtcgatcagcagctcggaaaacccccaggcgcctgcggacaacgggcggctgcgggcatcgatcaggttttccaggtaacggtcatgctgctggaagtgctgcgttccgatgaacatgccttccgaccagaccacgcgattgttccaggacatgggggctccgattgcttcttattgggcagggctggatggggtggccacgacgtcggcgcgcacagcacgcacatcgaggctgatctggtattcggtgtactggcgcgcgggcacgttgagcaccgtacgccattgcgcacgatccaactcgcgatagcccaccagcaagccgatctggcgcgtggacgggtcgaggtcgcgctggatgctcagttgctcgccgggttgcaccatcacttcgtcctggtccagcaggtccaggcccagtgtggattgcgcacggtcggccagggcgaagtaatcggagcgggcgaaggtggcggcatttttcagttcgaaaatgcgcacccgcaccggggcggcctggccgttggcgccggggttaagcccgctgatcgcatgaaagtgcagctcgacggcggccgtgtccacttcggcctcggcggctgtttcgggtttgacggcgtctttggcacacgccgtcagcagaaacacggtggcgactgcgagtaaaaacctgggaatcatcctgcgtcctcaatgacgtacttagctatccgttaaatccatgtgctgcggttcagcgtcgctgtcgtgcgctgtgttcttcgtaggctcggctgaattcgcggccgaacaggtcctggaaatcttcctgggcctcgcgggaaatattgctgtagagctcggtgaactgctgccagtactgggcctggcgcgaaccattgaaaaggctcgacagcccgccgggcttgcccatgcgttcttccagttgggccggctcgaagcgactgagcaggtgcttgatcgccgcttccacgccggccatcaccgccaactggtgggcacgcaggtcgttgaaactgtcgcgcacggcgaggtcgggtgccataaacgcctggttgccgtggcgcaggagcagcagtaacgcttcgtcggcattcggggcgaatttcaacggattgttttctgccggctggatcatggtctgctgcatgcgaaactcgcccttgaggctggcacgggcccgcagcacgtcgatcaggccttcgaccatcaggcggtagctgcggccgatgttttccatctgggcctcggcctgggctttgtccaggcgcagttgatccaggcccgcgccgcgcaggaaggcttgcagcaggtccggttgctggctgtcggccacggggggcgggggctcgaccacggggggcggctggatgaccggtggcggcgcaggtggcggcgcagcgctgacgacgggtgctggcgtgtcgccaaacaggtcccagtcttcgggaatcaccgcgcccgacaccaccggcggtgccactaccggcgcagccactggcgtcggcggacggaagtcatgttgctcggaaggcacgtggtccggcacggtcggtggcggtacggcggtggggctgaggaagtcgaacaggtccggcagcgtgtccatcgatgaagcgccctggaactgcggcgcgatcacaggggtggaaacaggcacgggcttattcgacacggcacccatcagcgcttcgaaactgttcggcgcctcgccggcaaacggctggctgtcgacggcctgtacgttgaaatcgatacgcgcctggatctcgtaatcgccgatgcggatcagctcgccatcctgcaacagctcgctgttacctctacgcaaacgaataccggcgttaaccaactccacgccgttggtactgttatcggttaaataataacggccatctttgtattgaataacgcagtgctgcgaggagaccagacgctcaggatcaggcaatacccagtcattatccgagctgcggccgatagccatcgagccctgattcatggacttttcggagcactgcccaggggtaatcttgtgataactagtgatagtcaaacacagcgacatcttgcctccttgctgatacttcgcgcgcggtcgattcccgggacagcgcttcccgggatatccccatcaggtcgagcaatcgaccgtccaaaacctgccaataccagcatgatcgctgatcttaactgggctctatgacaaaaatcctgtcccggtacgtcgttcgacccactagtcgcgcaggttgttaagcaccgcacatctgtcacagagggcgaatagcttaccttgacaaggcataagtactacaccaaaaatgcacaacttcttgaataccagtgatggcacattagtggcgtcttgcttatatgaccaagaaaacatgcaaagttccttgcgcaactaatgcatgaattgcccgccatctaacgggctgatagggagatcaaattcagtggatgtgccgttgctgctcaccgccgtttccgcgacttcgccctgtggcgaagacatggaatatgacgcgcaatttctgcaattggagcgtgatgccaagggccaacccgagcgcagcatgggcgactcgatcctgcccgctgaaccgccggaatggcgcagcatccagcagcaaagcctcgacttgctcgcgcgcagcaaagacctgcgcatcacccatttcctgctgcaaagcgccctcgccctccaaggcgtggccggcctggccgaagcgctgacgctgatcgatgcgttgctgcgtgattactggtccgacctgcacccgcgcctggacgccgacgacgctaacgaccccaccgtacgcatcaacgccctcaccggcctgacctgcgacaccaacatccgcctgctgcgcgaaagcatcctcacgcgctcgcgcaccttcggccccgtgagcctgcgcgccgcgctcaacgccagtggcctgttgagcttccccgatgaacaactcggcgcgcagcagctcaacgcggcgttcctcgacagcgaccccgagcagctacaggccacccgcgacgcgctgatcgcggcgcgtgcggcgtgcgaagccatcgaacaacaggtcaacgatcaggtcggttccgcccagggcgtggacctcagtgccttgaagcaaccgctcaagcaggcgttgcagatactcaaccaagcggtgcccggcgccgccggcagcagcgaacccgaggccgtcagtgacgacaatgccccctcggccgacttcgccgccgcccccgcagcaccgcgtcccgttggcgatatcgccagccgcgacgatgtgctgcgcagcctcgacaagatccttgcgtactacacccggcacgagccttcgagcccgctgccggtactgttgaaccgggcaaagaatctggtgcatgccgactttgcggccatcgtgcgcaatctgattcccgacggcatgtcccaatttgaaaacctgcgcgggccggacggcgagtaagccatccgactgtgcagtaacaacaccgtcgctcaagcgaccaggagcagcaacgtggcgaagcaaagttctcagaaattcatcgcgcgcaaccgtgcgcctcgagtgcagatcgagtacgacgtcgagctctacggcgccgagaaaaaggtccagctgcccttcgtaatgggcgtgatggccgacctcgccggcaagcctgccgagccgttggcgccggtggccgaccgcaagttccttgaagtggacgtcgacaacttcgactcgcgcctcaaggccatgcagccgcgcgtggctttccacgtccccaacgagctgaccggcgaaggcaacctgagcctggacatcaccttcgaaagcatggacgacttcagcccggccgccgtggcccgcaaggtcgactcgctgaaccaactgctcgaagcccgcacccagctggccaacctgctgacctacatggacggcaagactggcgctgaagaaatcatcatgaaggcgatcaaggacccggcactgctgcaagcacttgccagcgcgcctaagcctgcaggggaccagtaatcatgactgacaataccgcccgcgaaggctcccagatcctgggcacccagaccgaagaagccagcgagttcgccaacctgctgctgcaagagttcaagcccaagaccgagcgcgcccgcgaagccgtggaaactgccgtgcgcaccctggccgaacaggccctggcgcaaaccgacctggtgtccaatgacgcgatcaagtcgatcgaatcgatcatcgctgccatcgacgccaagctgaccgcccaggtcaaccagatcatccaccacccggatttccaacagctggaaagcgcctggcgtggcctgcactacctggtcaacaacaccgagagcgatgagcagctcaagatccgcgtgctcaacatctccaagccggacctgcacaagaccctgaagaaattcaagggcaccgcatgggaccagagcccgatcttcaagaagatgtacgaagaagaatacggccagttcggcggcgaaccctacggctgcctggtgggcgactactacttcgaccagtcgccacccgacgtggaactgctgggcgagctgtccaaagtctgcgccgccatgcactccccgttcatcgctgcggcctcgccgaccgtgatgggcatgggctcgtggcaagagctgtcgaacccgcgcgacctgaccaagatcttcaccaccccggaatacgccggctggcgttcgctgcgtgaatcggaagactcgcgctacatcggcctgaccatgccgcgcttcctggcgcgcctgccgtacggtgccaagaccgacccggtggaggccttcgccttcgaagaaaacaccgacggtgccgacagttccaagtacacctgggccaacgccgcgtacgcgatggcggtgaacatcaaccgctcgttcaagcactacggctggtgctcgcgcatccgtggcatcgagtctggcggcgaagtggaaaacctaccggcccacacgttcccgaccgatgacggtggcgtggacatgaagtgcccgaccgaaatcgccatcagcgaccgtcgtgaggcggagctggcgaagaacggtttcatgccgctgctgcacaagaaaaataccgacttcgccgcgttcattggcgcgcagtcgttgcagaaaccggccgaatacgatgacccggacgccaccgccaacgccaacctggccgcgcgcctgccgtacctgttcgccacctgccgtttcgctcactacttgaagtgcatcgtgcgcgacaagatcggttccttcaaagagaaggacgagatgcagcgctggttgcaggactggatcctcaactacgtggacggtgacccggcgcactccaccgaaaccaccaaggcccagcacccattggctgccgccgaagtgatcgtggaagaagtcgaaggcaacccggggtactacaactccaagttctacctgcgcccgcactaccagctcgaagggctgaccgtgtcgctgcgcctggtatcgaagctgccttcggcgaaaagcgcgtaaaccaccgatgagctagctcttctgtgggagggggcttgcccccgatggcatcaccggggtgtaactgacacaccgaggtgcctgcatcgggggcaagccccctcccacacaaaagcactgcccatttggagttaatcaaattcagtggcccacgccacacagggagaaaacatggctgttgatattttcatcaagatcggcgacatcaagggcgagtccatggacaaggcccacaaggacgaaatcgacgtgctgaactggagctggggcatggcccagtccggcaacatgcacgtgggcggcggtggcggcgcgggcaaggtgaatatccaggacctgtcgctgaccaaatacgtcgacaaggcttcgccgaacctgatgatgcactgcgccagcggcaagcacatcgacaaggtcaagctgaccgtgcgcaaggccggtggcgaaagccaggtcgagtacatggtgatcaacctggaggaagtgctggtcacctcgctgagcaccggcggttcgggcaccgatgaccgcttgaccgagaacgtgaccctgaacttcgcccaagtgatggtcgactaccagccgcagaaagccgacggcaccaaagacggcggcgcgatcaagtttggctggaacatccgttccaacaccaagcgctgatagcctttatggccgtggcatcgcgccacggccatacgtcctctgtccctctcgcaacccgtccgtggagctgctttggtgatcactgaaatcgcttcccgcgaccgtctgcaaccgtccctgttggaccggctgacggacgacgatccaaccaaccccaaggaaagcgccgacaaacgcgtgctgtccctgacccaattgaaagcctcggtactgcgtgacctggcgtggctgctcaacaccacgtcgttgctcgatgccgatgccacgctgcacaccccggccggcacctcggtggtcaattacggcctgccggcgctggcgggcaacagtgtttccagcgtggatatcaaggcgctggaagccctgatctaccaggccatcgccacctttgagccgcgcattctgcgccacaccctgcgtgtcaaagcccgtgtcggccatggcgagatgaaccacaacgccctgagtttcgagatcgaaggcgacctgtgggcccagccggtgccgttgcgcctgttgctgcaaaccgacctcgacctggaatccggccacgtacgcgtggtgaatgccgaccagcggaggcgcccatgaacccgcgcctgctggagctgtacaaccaggaactgcaccacgtgcgcgaaagcgccgcggagttcgccaaggaatacccgaagatcgccagtcggctgaccctgtccggtatggactgcgccgacccgtacgtcgaacgcttgctcgaaggctttgcctacctcacggcccgcgtgcagctcaagctcgacgccgagtacccgaccttcacccacaacctgttggaaatcgcctacccgcactacctggcaccgacaccgtcgatgacggtggtgcagttgcagaccgacccggacgaaggctcgctggccagtggtttcccgctgcctcgcgacaccgtattgcgcgctgcgctgggccgcgaaacccagacctgctgcgagtaccgcaccgcgcacccggtgacgttgtggccgttgcaggtgagcaacgccgagtacttcggcaaccccgccgctgtgttgggccgcctggccgccagcgagccgaaagccaaggccggcctgcgcctgaccctgcgcaccggtgccgagctgccgttcaacagcctcgacctggataatctgccgctgtacctcagtggcgccgacgagcaacccttccgcctctacgagcaactgctgggcaacgcctgcgcggtgtttgcgcgcaagccgggtggcgattgggtcgagcgcctgccccaggacgcgttgcgctcccgaggcttcgacgacgccgacgcggccatgccggtggtggcgcgggccttccagggctatcgcctgctgcaggaatacttcgccctgccccaccgcttcctgttcgtcgagttcgccgagctgagccgtgcggtcaagcgttgtgacggccaggagctggaactgattgtgctgttcgaccgccacgaaccgagccttgaaggcagcgtcggggcagcgcagttcctgccgttctgtaccccggcaatcaacctgtttcccaagcgcgtggaccggatccacttgtccgaccgggtcaacgagcaccatgtgatcgccgaccgcacgcggccgatggatttcgagattcactccttgagcggcatcaccggccacggcaccgggccggagcaaccgtttttgccgttctacgcggtgcgcgacccgtcgcgttatggccgtgaccaggcctattacaccgtgcgccgcgagccgcgcgtactgtccagcgaccagcgccgcaacggtccgcgctccacctatgtgggcagcgaaaccttcgtcagcctggtagacagccggcagtcgccgtaccgccacgacctgcgccagctcggcgtgaccgcgctgtgcaccaaccgcgatctgccgttgttcatgagcgtgggcaacggcaagaccgacttcaccctggccgacagcgcgccggtattgtcggtgcgctgcgtggcaggcccgagccgcccgcgccccagccacgcgcatgacgccaaggcctggcgcctgatcagccagctctcgctcaactatttgtccctgagcgaacagggccagggcgccggcgccttgcgcgaactgctgcgcctgtacggcgacagcaacgacgcagcgctgcaattgcagatcgaaggcctgcgcgacgtcagtagcaaagccgtgactcgacgcctgccgatgcccggcccgatcgtgttcggccgaggcctggagatcaccctggaattcgatgaaaacgcgtttcgcggcaccggtgtgttcctgctcggtgcggtgttggaacgcttcctggcacgctatgtgtcgatcaacagttttaccgagacggtgatccgtaccaccgaacgcggcgagatcatgcgatggaaagccaagcccggacgtcgtccgaccctgtgagtaccctggatgcgatgcaccaggagccctgggaatacgatttcttccaggcgctgcggcgtatcgagtgcgaatcgccggagctgccgcgcctgggccattccctgcgcctggcggatgaccccctgcgcctggggcagcaggccgattgcacgtttgctccggccacgctggcctcggtcgaccccggcggcgacggcaagccggcgcgcctggagcagttcttcttcggccttggcggccccaacggccccctgccgctgcacatcaccgagtacgtgcgcgagcgtcagcgcaacaacgccgacagcaccagcaagcagttcctggatgtgttccaccatcgcctgctgagcctgttctaccgggcctgggccgaggcgcggccgacggtcagccacgaccgcccggacgatgactactggtcggcacgcctcgccgcgctgagcggccggggcatgccgagcctgctgaatcaggggctgatcccggataccgccaagctgcactacagcggccacctgtcggcgcaaacccgctacccggacggcctgaaggcgattctcagcgagtatttcggcctgccggtagagatcgaagagtacgtcggccaatggctggaactgcccgaacgcagccgcgtgagtgtgagcgccaaccgcctgggcgtggacttttgcctgggcagcttcgtgtgggaccgccagcacaaattccgtatccgcctgggcccgctcacgctggatgactacatgggcatgctgcccggccaccagccgttcaacgaactggtggcgtgggtggccgagtacctgggccatgaactggactgggacctgaacctggttttgcaacaacccgaagtcccggcgctgcaactcaacggccagttccgcctgggcttcaacacttggctcggcaaacccgagcatgacgccaacgacctaatcctggcccggcactatgccgaccacgccaccacctcaaggaatccagagcatgggtgaaatcagtcgcgccgcactgttcggcaaactcaacagcgtggcctacaaggccatcgaagccgccaccgtgttctgcaaactgcggggcaacccgtatgtggaactggcccactggtttcaccagttgctgcaactgcaggactcggacctgcaccgcatcatccgccagttcaacgtcgagccggcgcgcctggcccgcgacctcaccgaagcgctggaccgcctgccgcgtggctcgacgtcgatcaccgacctgtcgtcccatgtggaagaagctgtcgagcgcggctgggtctacggcagcctgatgttcggcgaaagccaggtgcgtaccggttacctggtgctcggtattttgaagacaccgagcttgcgccatgcgttgctgggcttgtctgccgaattcgacaagatcaaagccgaggcgctgagcgaacgctttgacgaatacgtcggtgattcgccggagaatgcgttgagcgccagcgacggtttcaatgccggtgttccaggcgaagccagcggcgcgatggcgccgagtgcgatgggcaagcaggaagcgctcaaacgcttcaccgtcgacctgaccgaacaggcgcgcagcggcaagctcgatccgattgttggccgtgatgaagagatccgccaactggtcgacatccttatgcgccgccgtcagaacaacccgatcctcaccggtgaagccggcgtgggcaagaccgccgtggtcgaaggcttcgccctgcgcatcgtcgccggcgacgtgccgccagccttgaaagacgtggaactgcgcagcctcgacgtgggcctgctgcaagccggcgccagcatgaaaggcgagttcgaacagcgtctgcgccaggttatcgaagacgtccaggcctcgcccaagccgatcatcctgtttatcgacgaagcccacaccctggtgggtgccggtggcgccgccggaacaggtgatgccgccaacctgctcaagccggccctggcccgtggcaccttgcgcaccgtggccgccaccacctgggccgagtacaagaagcacatcgagaaagacccggcccttactcgccgcttccaggtcgtgcaggtcgccgaaccgtcggaagacaaggcgctgctgatgatgcgcggcgtggcctcgaccatggaaaaacaccaccaggtgcagatcctcgatgaagccctggaagcgtcggtgaagctgtcccaccgctacatcccggcgcgccagttgccggacaaatccgtgagcctgctggacaccgcctgcgcccgcgtcgccatcagcctgcacgcggtgccggcggaagtggacgacagccgtcgtcgtatcgaggcgttggaaaccgagttgcagatcattgcgcgtgagcatgccatcggtattgcgattggtgcacgccagaccaacaccgaggcgctgttgaatactgagcgtgagcgtctggcgaccttggaaagccgctgggccgaagagaaaaccctggtcgatgagttgctggcgacccgtgcaacgctgcgcgaaaaagcaggcgttgtggacagcggcaacgatgagttgcgtgctcagttggtcgacctgcaacagcgcctcaccgaactgcaaggcgaaaccccgctgatcctgcccaccgtggattaccaggccgtggcctcggtggtcgctgactggaccggcattccggtcggccgcatggcgcgcaatgaattggagacggtgctcaacctcgaccagcacctgaaaaaacgcatcatcggccaggaccacgccctgcagatgatcgccaagcgcatacagacctcccgcgccggcctcgacaacccgagcaagccgattggtgtgttcatgctcgccggcacctcgggggtgggcaagaccgaaaccgccctggccctggccgaagccatgtacggcggcgagcagaacgtcatcaccatcaacatgagcgaattccaagaggcgcacacggtgtcgaccctcaagggcgcgccaccgggttacatcggctacggcgaaggcggcgtgctgaccgaagcggtgcggcgcaagccctacagcgtggtgctgctggacgaagtggaaaaagcccacccggacgtgcacgagatcttcttccaggtgttcgacaagggcgtgatggaagacggcgaaggccgggtgatcgacttcaagaacaccttgatcctgctgaccaccaacgccggcaccgagctgatttcccacgtctgcaaagacccggcgaacatccctgagccggaagacatcgccaaggccctgcgccagccgctgctggagatcttcccgccggccctgctcggccgcctggtgaccattccgtactacccgctcagcgacgagatgctcaaggcgatcacccgcctgcaactgaaccgcatcaagaagcgcgtagagaccacccacaaagtggccttcgactacgacgacgcggtggtagacctgatcgtctcgcgctgcaccgaaaccgagagcggcgggcgcatgatcgataccatcctcaccaacagcctgctgccggacatgagccgtgagttcctcacgcgcatgctggagggcaaggcgctggcgggtgtgcgcatcagcagccgggataacgagctgcattacgacttcagcgattgacctgtcgaaatgtgattaaaattgtgggagggggcttgcccccgatggcgtcgggtcagccagaaatttctaacctgatacaccgctatcgggggcaagccccctcccacacttgattcggtttcttcagttatcaagtcatttacgggttaaccgatgctattcaaccaagcctcacgcctggccaagatcaccagccccctcgggccggatgtgctgctgctcaatgaaatgggcggcggcgaagagctgggcaggctgttcagttacgagctgcaactgacgtccctggacgccaacatcgacctcaaccagttgctcggcaaacccatgagcgtgggcctgcaactggcggacggcggtgaacggcacttccacggcatcgtcgcgcggtgtagccagaacatcgaccagggccagttcgccagttaccaggtgaccctgcgtccgtggctgtggctgctcagccgcacctccgattgccggattttccagaacctgagcatcccgcagatcatcaagcaggtgttccgcgacctgggcttttccgacttcgaagacgccctgagccggccgtaccgcgagtgggaatactgcgtgcagtaccgcgagaccagcttcgatttcgtcagccgcttgatggaacaggaaggcatctactacttcttccgccacgagcaagaccgccatgtgctggtgctggccgatgcctacggcgcccacaccacggtgccgggctacgcgtcgatcccgtattaccccaaggacgaacagcagcgcgaacgcgaccacatgcacaactggcacctggcgcaggaagtgcaaccgggttcactggagctcaacgactacgacttccagcgccccagcgccagcatcgacgtgcgctctgccatgccgcgcccgcacaccgccggcgactacccgctgtacgactaccccggcacctacgtgcaaagcgcagacggcgaacattacgcgcgcacgcgcatcgaagccctgcaaaccctgcatgaacagatcgagttcagcggcaatgcgcgggggttgggttcggggcatttgttcagcctcaccggcttcagccgccaggaccagaaccgcgaatacctgatcgtcggttgccgctactacatcgtccaggaaagcctggaaagcggcggtggttcaggctctgcgcaatttgaaagcagcctcacgtgtatcgacgcccagcagagcttccgcccgttggccagcacccaccgccctatcgtcaaaggcccgcaaaccgcgctggtggtcggccccaagggcgaggaaatctggactgaccaatacggccgcgtgaaggtgcacttctactgggaccgccacgaccaatccaacgagaacagctcgtgctggattcgcgtgtcgcaatcctgggccggcaagaactggggttcgatgcagattccacggatcggccaggaagtgattgtgagctttctggaaggtgatcccgaccgaccgatcatcaccgggcgggtgtacaacgccgagcagaccgtgccttacgacctgccggaaaacgccacccagagcggcatgaaaagccgttcgagcaagggcggcacgccggccaacttcaatgaaatccgcatggaggacaagaaggggttggagcagctgtatatccatgccgagcgcaaccaggacatcgtggtcgaggtggatgagagccattcggtggggcatgaccgcaacaagagcatcggccacaacgagacggtgaccatcggcaacaaccgcctgcgcatcgtcaagcaggaagacatcctctcggtgggccagcgcaagaccgacagcatcagccagagctacgtcatagaagtgggcgaaaacctgcggctggtgtgcggcgaaagcatcctggagttgaacgccagcggacagatcaacctcaccggcgtgcagatcagcttctatgccagcggcgacgccgagttcaacacaggcggcgtgctgcacctgaacaacggtggcggccccggcgccacacccgatggccagggccagaaagccgccatcgacgccaatatcaaagccgcgttccccgcgcctaaaagctcctgacgagacctgttctcatgacgtatcgaatcaacgaattccagtttcaactgcccgccagcgagttgcaggacgcgacgatcaatatcctcaagttccctgaattgggcacctccctgatcgtcagccgtagcctgctcgccgagggtgaaaccctgcacagcaacttcaatgaccagctccagcgcctggaaaaacaggtacaggatctgcgttatcagccgggcgttgatgtgcgcctgggcgccgcgcaagaggtcgaaggcattgagctgcgcagccagttcaacaagggcaatgacaaggtgttccagtatcaactggcgctagtgctaccgggtacgcgcaagatgcttgccttgagttacgtgaaagccgacaagctcggggatgccgaggcggcgcattggtcgacgatcaagggctcgctcgtgttcgacgtcccccagtgaagcggcctttgcatgtctgacgcactgctctgggctgcgcgcctgggcgatgggctgtcccacacctctgtcatggcggacatcctcggcggcgtactggaggtggcggccaatgtggcgattactgcattggcgaccgctgcggtggtggcggctaccggcattaccgtcgcgaccggtggactgggggcctgcgtgctgggggcggtcgtcggcgtcatcgtcggcatcgccatgagcaagaccggggccgacaaggggttgagcgccatgtgcgaaggaatcggcaacgcgctgttccctccctcggtcatggccacgatccttagcgggtccaccgacacactgatcaacgccttgcccgctgcgcgcgcggccggcgtcgtgccctcccacgttgcacctgcgggcaccgaaaccgaagcgccgccgccagcaccggaacacagccaagagcccggctacctggacatggccaaaggattctttgcgcaaatgtggcgccccaccgtcgccacgccagcgccaggtgcagtccctaaaccgctggacgtggtgacctgcacaaaacacccgccgatgccgccgcagtttctggccgaaggctcggaaaaggtcacggtcaacggtcaaccggcggtacgcagcggtgaccgcagcacctgcgatgccaccgtggtgtcgtcagggctgatttcgcccaatgtgactatcggcggcggctcagtcgtggtgcgcgagatccgcagcggcaagacgccgggggttggcctggccgtcactgcgctgatgatgctcaaggggggtaaaggcaagttcctcagcaaccttccctgcatgctgctggcaggtgtcaattcgtttgtggtcagtcaggccatgggcgcactggccaacgccgccatgggctcttccaacccggtgcacgcgagcacgggggccaaggtgctgggcggtcccgaggagctggatttcgccttgcccggaatcatgcccatcgactggcagcgtttctacaacagccgagatgaacgccgcgatggcttgtttggtgccggctggagtgtgccctatgaagtcagcgtgcagctgctgcctcactctgaagggggcgactacgcgttgtacatcgacgagcagggtcgacgtatcgacatgggttcgatccctttgggcggtgccgtgttcagcgctggcgaaggcctcagcgtcaagcgtcacttgaacggccagtggctgatcgaaagcgcagacggcttgtaccggctattcgatccggcgccacaggactcatcgttgctacgcctgagccaactgggagatcgcaacgacaaccgaatccacctcgactatgccgacgatggtcgcctgctgggcctgcgtgacacctttgacctggtcagggtcgagctgacctacgacagcacttggccccggcgcgtcagccggatcgaacggctgtatcccgaccaccaccgtgaagcactgatgcattacgcctacgacgtccgtggcgacctggccgctgtacgccagtccgacgggcacgtgaagcgccgttttgcctatgatgccgggcagcgcatggtcgagcatcaactgcccagcggcctgcgttgcttctatcagtgggccagggttgacgaccgtgaatggcgtgttgtgcggcattggacggaggccggggacacctacacattcgactatgcgctggacaccggcatcacccgtatcaccgacgggctggcgcgtgtcagcattcgacactgggatgagcgacaccagatcatcgcgtccaccgatgcactggggcgaacctgggccttccggtggaatgatgaaagccaactactgggcgcaaccgaccctctcggtgggcattatcagttcagctacgacgatgccggcaacctgactgagaccctcgaccccctggggcgcagtgaatcgaccttgtggctggagcactgggcgctgccactggcggagaccgatgccgctggcaatacctggcagtaccattacgactcgcggggcaactgcattcgcgaaaccgacccgctgggcaaccgcacggtctatcactatgacggacacggccaggtcagggagatcatcgacgccagcggcaagcgcaagaccttgcgctggtccccactgggtcaattgaccgagcacaccgactgtacgggcctgaccacccgtttgagctactgcaagcgaggcttgctgctggccagtaccgacgcgctcggggaacgcaccaccttcaagtatgacgaccagggccgcctgatcagcaagcagttgcccgatgggcgcaacgagcactatcagcgtgacgtcagcggccagttgatcggctacagcgaccctgccggccacaccacgcgctttgagcatgcgtcgaacggccagttgcgccaacgcatcgacgcccatggccgccgtgtggagttgagccacgacgcctatggccgcctgcacagcctgaccaacgaaaatggcgagcgctaccgattcgactgggacgacggtgatcgcctgaccctcgaacagcgcctggacggctgccggaaacggtacacgtacgacccgctggacaatgtcacacaggtagaaaccctcgcatcgtccgacaccgagcccgccatcattcatgatctggagcgggacgcagctggccggctgatcgccaagcgcaccgtggatggctgcacgacgtaccgctacgatgagctcgaccaagtcacagccatcacctttacaggccacgacggcgagcagcaaaccctgggcttcggttatgacgccctcggccagctgacccttgaacaaagcgccgccggttgcctggagcatctctacgacgaattgggcaacctggcccagacccgccttcccgacggccgctggctcaaccgcctgcgctacggtagcgggcacttgcatcaggtcaacctggatgggcaggtcatcagtgacttcgagcgcgaccgtctgcatcgcgaagtgctgcgcacccagggccgcatcagcacgcgttgcgaatatgaccgcagtggacgtctgcgcgcccgccagcgccgccaaccggaccattcactgttacatccaccggcgcagacacgcctgggctatgacgacagcgaccaactggtcgaacgctacgacagccagcccggcgcggcacaccgccaattactgcattacgacgccaccggccgcattctggctagccaggacaacctcttgggccaacgggaagccttccgctacgacccggccgccaacctgttggatggctcaggacaggtcgcccacaaccgattgctgacctaccaggacaaacactaccgctatgacggttttggccggatggttgaaaagcgcagccttcggcgcggcacccagcgcttcagctacgacgcggagcaacggctggcacaggtgcataacgatgacggctcccgggtcgtcatgacctatgacccgctgggccgacgcaccgccaagaccacctacgactgcaacggtgtgcagcgcagccagacacgtttcacttgggacgcgttgcaactcgtgcaggagcactgcaatcagcagagcagcctctatatctatgccgacgagggctacgaaccactggcccgtgtcgacggcatgggtcacctgcaaaaaatccgctactaccacaacgacctcaacggattgcccgaacgcctcaccgagagcgacggccatacggtgtggcaagcgcgctatgaagtctggggcaataccgtcgaggaaagccgagaaccctacttcatcgaagaacagaacctgcgtttccagggccagtatctggaccgggaaacggggctgcactacaacactctgcgcttttatgacccggatatcgggcgcttcaccacacccgatcccatcggtctggccggcggcctgaatctctaccaatatgcgcccaacccgctgagctggattgacccgttgggcctgatgaaatgctccagcccacccaaggggcgcaaggtcagtcgcaccgtgtatcggttcgaggaaccggggcgcatcgggaccacttggcaggcacacaagtggaatgtggagtccacccaccgctacaccaccaaaggcgtcggcggggtgtatggcgcgaactcacggaaaaccgcgctgggcgaggtcacgcactggaaggtcgacctgtccaaacgggtgttggtcagcaagaaagtgcagctcaataatgtcctggatctgacccgcgccgatgtgcgcaaacagctaggggtcagccttaaaagcatcaccggctcgaagtacaccgagacccatcagatcggcaattgggccaaggccaacggctatgatggaatcctggcgccatcggcacgcaacccgaccggcagcaacttgatctcctttgcaggtttttgaacatggaacgactggaaaacgaatacccgggtgacgcggactggcagagcacagtggccctgtatgaagaggactaccttgacgacgatgcgcgtgaactggccaaggccttgggcggccatctcgacctggcagtgatactgcgtggaaaacgaggccttgaagaggggttgtggtggatcgggcaaaaggttccggcactcgacaacctcaccccgctggagtgcctggaaagtcccacgctgataaaacgcttgaagacagcactgatgcgcatgccataacacccaaggacacggcgactatggaaagttgtgcgttcaattcaatcagacacaggagtgcagtgcgtgtctgatgcactctgggcggcccggatgggcgatgcgctgactcacacctcgatgatggcggacatccttggcggggtgctggaggtcgcggccaatatcgcgatcacggctgtggcgacggcggctgtcgtcgccgccactgggattaccgtcgccaccggtgggcttggctgtttcctgcttggtgcagtggtgggcacgattgtcggcctggccatgagcaagaccggggccgacaaaggcctgacgaatttatgcgatacgttcgccaacgcgctgtttccgcccacggtgcaggccaatattcttaccggcgccaccgacactctcaccaacaacatcccggccgcccgcgccgccggggcgatcagttcccatgtcgcgccggccgggaccgaactggaagaacccacacccgagccggaagccagctatctggatatggccgaaagtttcttctcgcagatgtggcgccccacggttgcaaccccggcgccgggcgccgtgcccaagccgctggacctggtggtgtgcatgaagcacccccctatgcctccgcagttcctggccgagggctcggataaggtcatgatcaatggccaaccggcagtgcgcagcggtgatcgcagcacctgcgatgcaacggtggtgtcgtccggcctgatttcctccaacgtgaccattggcggtggctcggtggtggtgcgcgagattcgcagtggcaagacgccgggcgtggggctggcggtcacggcactgttgatgctcaagggcggcaagggcaagtttttcagcaagttgccgtgcatgttgatcggcggcgctacgtcgatggcggtcagcagcgcgatgggggccgtggcgaacgcagcgatgggctcttcgaatccggtgcatgcggccaccggcgcgaaggtgctgggcggcgatgatgagctggatttcgtcctgcccggcatcctgccgattgattggcaacgcttctacaacagccgcgacgcacgcacgggcagtcttttcggcgcaggctggagcgtgccgtatgaagtgtgcgtcgacatccagcctcaccccgatggcggcgaaacgctggtctacaccgatgaacaaggccgccccatcgacatgggctcgattcccttgggcggcgccgtgttcagcgcgggtgaagggctggccgtgcggcgacatctcaatgggcagttgctgatcgaaagcgatgacgggttgtatcgcttgtttgaaccctctgccaacccgtcgttgctgcgccttagccagctcggcgaccgaaatgacaaccgcatccaagtcgactacgacgccgccgggcaactggtgcgactgcgcgataccttcgacctggtgcaggttgagttgatccgtgatcagggccagttggcgcgcatcgaacgcctgtaccccgatcagcgccgcgaagtgctcgtcagctatggcttcgacgcgcagggcagcctggctgaagtgcgcgataccactggccaggtccagcggcgtttcgcctacgacagtggccagcggatggtggagcatcaactgcccaccggattgcgctgcttctatgagtgggccttggttgaagacctggaatggcgcgtggtgcggcactggaccgacgaaggcgacgcctaccagttcgactatgacttgcaggccggtatcacgcgaattaccgatggcctgcaacgcgtcagtacccggcattggaacacccaacaccagatcattcgatacagcgacaatctcggccacacctggctgttcgaatggaacgacgagcgccagttgctcagtgccactgatccgctgggcgggcgctttgcatacagctatgacgaggccggcaacctgatcggcgaaaccgacccgctagggcgcagcgattcgaccttgtggcttgagcactgggcactgccactggtggagaccgacgccgccgacaatagctgggcgtatcgctacgatcagcgcggcaactgcatcgccgaaaccgatccgctgggctacgtcacccgctaccgctatgacgaccacggtcaggtcgtggaaatcatcgatgccaccggcaaaagcaaaaagctgcgctggaatccgttcgggcaactggtcgagcataccgactgctcgggttacccgacgcgtttcagctatgacgagcgcggctatctgcaggtcatcaccgatgctctcggcgaacgcactcaattcagctatgacgcacaggggcgcttgctcaccacccagttgccagacggtcgtatcgagcagtaccagcgcgatacgagcgggcaactggtgggttacaccgacccggccggacataccacgttgtaccagcacaaccgtcgcgggcaggtacgccagcgcatcgatgcccatggccggcaagtgcagttcggctatgacagctatgggcggttgcaggcactgatcaatgagaacggcgagcgatatcgtttcgcgtgggacgctggcgatcggctggttgagcagcaagacctcgatggcagcgccaagcgctacgattacgacgcgttggataatgtcacgacgctgacggccgttcccgcgccttacggcaatggcctggcgttggtgcccgacataccacccgcgcctatcgtgcatcgactcgaacgcgatgcggtcggccggttggtgaccaaaaccacggacgatggccgcaccgagtaccgctacgacgagctcgaccaactcactgctgtcaccttcaccgacctgcaaggcaacgcccaggccctgggcttcgcctacgacgccctcggccagttggtgaccgaacaaagctcggcaggcggcctgcaccaccactacgacgagctcggcaacctgatccagacccaactgccggacggccgctggctcaatcgcctgtactatggcagcggccacctgcaccagatcaacctcgacggccaggtcatcagcgacttcgaacgcgaccgcctgcaccgcgaagtgctgcgtacccagggccagctcagcacccgcagcgaatacgaccgcagcggccgcctgcgcgcacgtcagcgtcgtcacgccggtcaatccaccttgctgcccgctgcggcgcaaaaacagttcgagtacgaccccgccgacaacctgatcggcaaactcgaccagcagcccgccacgcaacaccgccaactgctgcactacgacgccaccggccgcatcatcgccagccaagacagcctgcacggccagcgtgaaaccttcgcctacgacgccgccgccaacttgctggacggcccgcaggctggcgcggggttggtggtgcataacaagctgctgacctatcaggacaagcgttatcgctatgacgcgtttggccgcacgattgaaaaacgcagcgccaaacggggcgtgcagcggtttgcctacgatgctgaaagccgcttggttgaagtgcgtaacgatgacggcagcgtcgtgcgaatgacctatgacccactgggccgacgcatcgaaaaaaccgagcatggccgtgacgggtatccgctgggagaaacgcagtttgtgtgggatggactgcggttgttgcaggagcataaacacagccagaccagcctctatgtttacgacgatgacggctacgaaccgctggcccgcgtcgacggccttggcccgttgcagaagattcgctactaccacaacgacctgaacgggttgcccgaacaactgaccgaggccgatgggcacagcgtctggcaggcgacttatcgggtgtggggcaacacactggaggaagtgcgcgagccttattacattgaagagcagaatctgcggttccaggggcagtacctggatcgggagacggggctgcatttcaatacgttcaggttttatgatccggatgtggggcggtttactacgccggatccgattgggtttgatggtgggctcaatttttaccagtacgcccccaatccaatatcctggattgatccatggggtctggcccccgagctttactatctgattgcgaagaaagatggcctttatgatgaaatggcgtggggccataaaaagccagttggtaaagtttatttgaagaaaggtgaagtctggaaagtcggtgaaactgtcaatccgaacaggcgatacacgcaaaagtggctcaaagctaacaacctcgcttacaaacgcgtgatggcggcccccacgaaaggcaacatgcaagtatgggaaaggctaaaaatcggaaagtatttcaaacgccgaggaaaactgcctccaggtaacaagtgcagacactgagatgaggattactttatgcgagtcgatacaacatcggactcacccagctggacaaaagtctttgaaatcactgacgagctaaatggcttgagtgagattcttgagaagaaatatccctccctcgactgggaacttgcagtctgcatgcgatgcctgcctcaggggctcgagcggaaaacattttgccgttactacaccaaagacaaaatgttcggcctggacatcgctatggacgaggaagatttcatcccgtacaaaaaggataaggccgctcaacgtaaattaatcggcgcagcgttttttgagttttttgttgagagcattaaaaaatacgaaaaaaagctccccaatcttcagccggtttcagaacaactgatcgccgatgtgaagcaatggtgtaccgaaaacgaatgggtagcctgaaatcccaaaaaaggctacggggtgccccacaaaaaatgggcacccaaccccgtcggcgtgcccatttttcctaccaccccgcccccttcgagacggtaacgctcttacgcgttaacagtgtctttcagcgatttacccggcttgaacgcaaccgtgttgctggccttgattttcaccggctcaccggtttgagggtttttgccagtgcgagcgccacggtggcgttgcaggaaggtgccgaagccaaccagggtgacgctgtccttgcggtgcagggcgcctgtgatttcttcgagaacggcgttgaggacgcggttggcctgttctttagtgagatcggctttttcagcgatggcggctgcgagttctggtttacgcataagtgaagcctctttgacggttttttgttgttatgtccgtgctgctctcttctggagcagcgcccaaagcgccgcaggctctactctgcggcagacgggagtgaggatggcatgccctcgcacgctccgccagtctagcggcgacctttctggagggaaaaacgtgcttattccgacagaacgaccggtatttacgccagcaacggcggaagttctttgttgagggccagtttttccatcacggcgctcccagtcagtgcgtaacccagcaggcgaccgctggcgtcacggcacagggccttgatgtcggcgccctcgccttcgacgctccagacaccttcggtgcctcgtggcggtggcgacaccaccagcgggcagatcggggttttcacggtcaccggcattgggccgtagctgacggcggtggcgtttccggccagggtctgagccagggcgcgggcgcagctcatcagcggcatcacgtacagcaggttcaggccgtcgacctcggcgcagtcgcccagggcgtagatgttggcgtgggaggtcttgaggtggcggtccaccatgatcccgcgattggtctgcaggcccgcggcggcggccaggtcgacgcgggggcgcaggccgatggccgagaccaccaggtcgcaggcgatcacttcgccgtccgacaggtgggcttccaggccatcagcgttgcgttgcaggcgattgagcaccgggcccaggtggaagcgcgcgccgaggccttcaaggcccgcctggactgcggcggcggcagccgggtgcagcagggtcggcatgacctgctcgcacggcgccaccaggtcgatttcataaccgcccaggatcaggtcattggcgaactcgcagccgatcaggccggcgccgagcagcagcacgcggcgcttgccggcagcggcagcacgaaagcgtgcgtagtcttcaaggtcgttgatcgggaaaatcaggtcagccgcatcgccttcaaccggcacacgcacggtttccgcgccccaggccaggatcaggtcgcggtaggccaccgcttcttcgccgatccataggcgtttgtggccggggtcaatgccgctgacgcgggtatgggtacgcacttcggccttgagttgctcggccatggcgccgggttcagccatgctcaggccatcggcttccttgttcttgccaaagccggtggagagcatgggcttggagtaggagcgcccgtcatcggcagtgatcagcagcaatggggtctcgctgtcgagcttgcgaaactcccgggccaggttgtaaccggccaaccctgtgccgatgatcacgacaggtgcgttcattcctttctccttgtaatacttttctgaaaatcgagaatcagccgatttcgatcatttcgaaatccattttgcccacgccgcagtccgggcacagccagtcttccgggacatcttcccaacgggtgccaggcagaatgccgtcatccggccagccatccttttcgtcgtagatcagcccacagacgacacattgccacttcttcattacttgcttcctcagggtccaggcatcttggccgacggtcgatagacccgcgttgccgtacggctcagggcgttttgtactgatcgtggccggcagatgcaagcatgatcgacgcaaacagccggttgcgtccggcaaaaaccctgatcgccatggtaagctcgccgcctcttttgctgccgatactgactcaccgtgccgcactcaatcgaccctgccgatgcttgccaatggctgccccagagccttctgagccccatacccgggccctcgacccttgattggttgttcgatacaggctcgatgacccagcggttgacccagctgtcaaacaacggcttcagcatcaccccgctgttcgagggttggcagccgctgcgggatgatgaatgcgtggcccttggcctgccgctggcgacagttggctgggtgcgcgagacctatctgcatggcaatggccaaccctgggtattcgcccgttgcgtagccgcgcgcagtactttgcagggtgacggcttgcacatggatgcactgggcagccgcccgctggggtctctcctgttcagcgatcatgcgttcaaccgccaggccatcgaagtgtgccgctaccccagccagtggttgcctgcggaccaccagattgaagggctttgggcgcgccgctcgcgctttgatcgcggcccgctgagcgtgctggtcgcagaagttttcctgccgggcctgtggcaagccgtgcacaaccatgcggagaattgctgatgtatcaacgtctgctcaagtccttgaaccacctgaaccccagggcctgggatttcattcagttgacccgcatggacaagcccatcggcatctacctgctgttgtggccgacgctgtgggcgctgtggatcgccggcaaaggctcgccctctttaatcaatatcgtgatcttcgtgctgggcgtggtgctgactcgcgccggcggctgcgtgatcaatgactgggccgaccgcaaggtcgacggccacgtaaagcgcaccgagcaacgcccactggtcagcggcaagatcacttctaaagaggcactggtgttttttgcggtgctgatgggcatcagtttcctgctggtgctgctgaccaacgccaccactatcctgctgtccctcggtggcctggcgctggcggcgagctacccgttcatgaagcgctacacctattacccgcaggtggtgttgggggcggcgttttcctggggcatgccgatggcgttcaccgccgagaccggcagcctgcctgccaccgcgtggctgctctatatcgccaatctgctctggacggtcggctacgacacttattacgcgatgaccgaccgggatgacgacttgaagatcggtgtgaaatccaccgccattttgtttggtgatgccgatcgcgtgatcattctgacgctacaagggctgtcgctggtgtgcctgttgctggcgggtgcgcgattcgagttgggtggctggttccacctgggtctggtggccgcggcgggctgttttgcctgggagttctggtatacccgggacaaggaccgcatgaagtgcttcaaggcgttcctgcacaaccactgggcggggttggcgatatttgtcgggattgtgctggattacgcgtttcgctgaggattttgtggcggctgtcgcgacctcatcgggggcaagccccctcccacagttggaatgtgttcgcctgtaggagggggcttgcccccgatgctttcagtggcgccgcgtgatcaaggtttggcgaccttccaggccccgtccattttgccctcaccggtcatgtcgcccgctttcttgtccatgatgaaggtatagagcggcttcccgctgtatgcccattggcttttttgatcgtcacgggtgatgacggtccatttacccataggcttgtcggtggattcggccatcagtgggggccagttggtggcgcacttgtcgttgcacatggacttgccatcggcgtccttggcaaaggtgtagagcgtcatgcccttgtgatccaccagcatcccgtctttggtcatcgccggctccgccgcgaacgccaggcccggcagcgtcaatgccgccgtcaccagcagggctttccaggaaatcgtgctgtaagtcatcggaaccttccttttgtggttgtcaggattcggactcaaagcgtagtccagagaggcgggaattgcccgagcgactaaattactgtcacacgactgcaataattccgttatctaatgcggcgcaagacagttaaatgacaagaggattttcgagcatggttggcaggagcattctgattgttgacgacgaagcgcccatccgcgagatgatcgccgttgcgttggaaatggccggctacgactgcctggaggccgagaactcccagcaggcccatgccattatcgtcgaccgcaagccggacctgatcctgctggactggatgctgcccggcacctccggcatcgaactggcccgccgtctcaaacgtgacgagctgaccggggacatcccgatcatcatgctcaccgccaagggcgaagaggacaacaagatccagggcctggaagtgggtgccgatgactacatcaccaagcctttttccccacgggaactggtcgcacgcctgaaagccgtactgcgccgtgccggtcctaccgatggcgaagcgcctatcgaagtcggcggcctgctgctggacccgatcagccaccgcgtgaccatcgacggcaaaccggccgagatgggccccaccgaataccgtctgctgcaattcttcatgacccaccaggaacgtgcctacacccgtggccaattgctggaccaggtgtggggcggcaacgtgtacgtggaagagcgcaccgtggacgtgcatatccgtcgcctgcgcaaagccttgggcgatgcctacgagaatctggtacaaaccgtgcgcggtactggttaccgcttctctaccaagggctgagccaatcgcagcctgacttaacagctgacaaggacgcatgttcaagtgaaccaaaactggcatggcaccctgatccgccacatgcttttgctgatcaccggctgcctgctggttggcctggtcagcggctattacggctggagcctggcagtcggcattgccctgtacctgggctggaccctcaagcaactgctgcgcctgcacgaatggttgcgccagcacaaacccgacgaagcgccacccgatggctacggcctgtggggcgaggtgttcgacagcatctaccacctgcaacgccgcgaccagcgtgtgcgcgggcgcctgcaagcggtgatcgaccgggtgcaggagtccaccgccgcgctcaaggacgcggtgatcatgctcgacagcgacggcaacctggaatggtggaaccgcgccgccgaaaccctgctgggcctcaagacgccccaggacagcggccagccggtgaccaacctggtgcgccacccgcgcttcaaggagtacttcgaacaggagaactacgaagaagccctggaaatcccctcgcccaccaatgaccgcgtacgcatccagctgtacctgacacgctacggcaacaatgaacacctgatgctggtgcgcgacgtcacccgcatccaccagctggaacagatgcgcaaagacttcgtcgccaacgtctcccacgagttgcgtacaccgctgacggtgatctgcggctacctggagacgctgctggacaacgtcgacgagatcaacccccgctggagccgggccctgcaacaaatgcagcagcaaggttcgcgcatgcagacactgctcaacgacctgctgttgctggccaagctggaggccaccgattacccgtcggacaaccacccggtggcggtgcagagcctgttgcagaccatcaagaacgacgcccaggccctctccggccaacgcgggcagcagatcaccctggaagccgacccggccgtattgctcaagggcagcgaaggcgagttgcgcagcgcgttttccaacctggtgttcaatgccgtgaaatacacccaggacaaaggcaatatccgcatccgctggtgggccgacgaccaaggcgcgcacttgagcgtgcaggactccggcatcggcatcgacgccaagcacctgccgcgcctgaccgagcgtttctaccgtgtcgactccagccgcaattccaacaccggtggcaccgggctcggcctggcgatcgtcaaacacgtgctgctgcgccatcgcgcacgcctggaaatcagcagcgtgctgggacatggcagcacgtttacctgccattttccgccggcgcagatgacgcgttcgcgagccctcagcaacgacgagtaatccaaatacaccacgggcctaaatgtgggagggggcttgcccccgatggcggcgggtcagatatgaatgcgctgcctgacatactgccatcgggggcaagccccctcccacaggggaccggtgttgttttagagagtgcattccagccccgcccggcagtgggcactaggcaagcgccccgtcagccgctacattggccgacttgcgcctgcctttcaggcccacctgccaccccttactgaacatacggaacctgcaaaaccccatcatggacccttcccctggtatcaccctcgcgacactcttcgccgacttcggcatgattctttttgcactggtcctggtactgctcaacggtttcttcgttgcggcggaatttgccatggtcaagctgcgcgccacccgggtcgaggccatcgcccacaaaaacggctggcgcggacagatcctgcgcaccgtgcacagccagctcgacgcctacctgtcggcctgccagctgggtatcaccctcgcctccctgggcctgggctgggtcggtgagccggccttcgcgcatatcctcgagccgctgctgggcgccgtgggcgtcgagtcgccggaagtgatcaagggcgtgtcgttctttgcggcgttcttcgtgatttcctacctgcacatcgtcgttggtgagttggcgcccaagtcctgggcgattcgcaagcccgagttgctgtcgctgtggacggcggtgccgctgtacctgttctactgggccatgtacccggcgatctacctgctcaacgccagcgccaacgccatcctgcgcatcgccggccaaggcgagcctggcccacaccatgagcaccactacagccgcgaagagctcaagctgatcctgcactccagccgtggccaggacccgagcgaccaaggcatgcgtgtactggcctccgccgtggaaatgggcgagctggaagtggtggactgggccaactcccgggaagacctggtgaccctggacttcaacgccccgctcaaggaaatcctcgcgctgttccgtcgtcacaagttcagccgttacccggtgtatgacgcggtacgcaacgaattcgtgggcctgctgcacatcaaggacctgctgctggaactggcggccctggaccacatccccgagtcgttcaacctggccgagctgacccgcccactggagcgtgtgtcgcggcacatgccgttgtcgcagctgctggagcagttccgcaaaggcggcgcgcacttcgccctggtggaagaagccgacggcaagatcatcggctacctcaccatggaagacgtgctggaagtactggtgggcgatatccaggacgaacaccgcaaggccgagcgcggcatcctggcctatcagccgggcaagctgctggtacgtggcgatacgcccctgttcaaggtcgaacgcctgctgggcgtggacctggaccacatcgaagccgaaaccctcgccggcctgatctacgacaccctcaagcgggtgccggaagaggaggaagtgctggaggttgaaggtttgcgcatcatcatcaagaagatgaaagggccgaagatcgtgttggccaaggtgctgctgctggattgaccgtcaattgcccaatgcaaagttgggcaatgcaccgaccggctggttgaactcatacggaatcgagaccagccccgcctcggtggcgcgctgcaccacaaaatgcaggtgcggcccgctgctgttgccggtattgcccgacaacgccagcggactgcccaccgccacacgctgaccgacccggacgctgaccgaaccttgcttgaggtgcaggtacacgccctcggtgccgtcgtcgtggcgcaccctcacgaaattccccgacgcatcgctgccgcgcccggcctgcgcgttttcggtcttcaccaccattccactacgcgccgcaatgatcggcgtgccttcgggcatggcgatatccatggcgtagcgacttttggcgtcggtgtggctgaagctgccgttggggccttgggtcatgcggaaggggccgccacgccagggcaaggggtagcggtaggcttgttgtgcacgattgggcccgggcacgacaagcatcggtcgctcaaccttgcgctcctggatcacaaacacctgggcgccaggcgtatgccggtcgctgataaacaccaggccattggcatcgacggatttgtagagggtcatggcctgggccgacatagcgaccgttgccagcccgcagcacagcaaaaagcgcatgagcatggcgtgaacctgccgggatgactgaacggcaggttagcgcggtttgatgacaacttcaggcaggcagcccgttgaaacaaatatccacgttcatttgggcagccgccgacaaattgaccaaggcatccagggagagtttgtcgatcttgcccgtgagaacgtcgttaagtcggggctgactgatccccagtctttgcgccgcatctttttgagaaagctcccagctgcgaatggtttggcacagctccaaaagcaattttgaacgcagccgcatattggcagcttgctggggtgtctcttccagagcgtcccaaacagagctgaaacgctcgccgtaaactttttgatttgccatgggctcaccctaactcctgcaatctggcgcgagccagctcgatatcacgcccttcggttttctgtgaggtcttgcgcagcgcgtgcaacacatagatggcctctggccggttgaccacatagaacacccgaaaagcacccgattcttcagtgatccggatctcactgacgcccctcccaatggtcttcatcggcttgcagtcaaagggttgctcaccctgctgcaagagatccaactgaaaacccactgccctccgagcatcgagcggaaacgctttgagatccttgagcgagcttcctagaaacaccacatccttgtgccttggcattggcttctcttctcctttcatggaaagaaaaagcgtaatcgacgattcggccaagagacgtggaggtttgtttcaaggcatagcaaaggctcgataacaccggagcgttatcgagagactatatcgaaacagatataaatcaaggcaggcaccgggaatcagacagtcggtcgattcccggcaatcagagaatcacgcacccggcacaaaatgcttctgtgctgtaccgcgcgcaatcaggcgggagatgtagtcgagcttctgcgcatcctggtcgataaaccggaaggtcagttgcagccaatcgctgtccggcttcggttcaaaggcgacgatggcgtgcaggtaaccattgaggcgggccacttcggcgttgtcgccttgttccaggtcgagcacggcgctttccaggacctggggcaggacttcaccgcgacgcaccaccagcagcgcttccttgatgctcagcgccttgatcacgcattgctgggtgccgctggacaggcgcaattggccctggccacgaccacccgccggcgcagccgctatcggcgcctgcaccggtgggctgttgagcaagcctttgttaggcgcaggcgcagcagcaacaggagccgcacgtgccacttcgggtttgccgccggtcagggcgctcaaggaatcgttgccgaacgccgagttcatcttggtcggcgcgctggcgaccagggcgtcgaggcggccgatcttgtgcagggcctgcttgaccttgttcagcaactgttcgttggtgaacggtttgctgacgtagcctgaaaccccggcctggatagcctggactacgttttccttgtcgccacggctggtgaccatcacgaacggcatggctttgaggtgaggctgctcgcggcaccaggtcaacagctcaaggccggacatctccggcatttcccagtcgcacagcaccaggtcgaaggtctcgcgcatcaggatggcctgggcctttttgccgttcaccgcgtcttcaagcttgatcccggggaagtaattgcgcaggcacttcttcaccaggtcgcggataaacgaggcgtcatccaccaccaatacactgactttactcatcgacccttcatcctataaaaacttcggcacgcaagacgcctgactgatggcattttgccaaaaactctgcagtcacgttgggactttcttgtgtcccctcgctgaaaaattcgcgcccgcaaacaaaaacgcccgaccaaaggccgggcgttaatttctcgggcaaccttacttatcgtcaggtacgcccggaacattagggatttgatcgactgaaccttcaacttcggccttcatgcgcttgaggcccatgtgccgtacgtcggtgccgcgcaccaggtagatcaccagttcggagatattgcgcgcatggtcgccaatccgctccagggagcgcagcacccagataatgctcaagacccgcgagatagagcgcgggtcttccatcatgtaggtggcgagctcacgcagcgcggtcttgtactcacggtcgatgaccttgtcgtactgggccaccgacagggccagttcggcgtcgaagcgggcaaaggcgtcgagcgcatcgcgcaccatgttgcgcacctggtcaccgatgtggcgcacttccacgtaaccgcgtggcgcttcgccttcttcgcacagctggatagcgcggcgggcgatcttggtggcttcgtcgccgatgcgttccaggtcgatcaccgacttggagatgctgatgatcaaccgcaggtcggacgccgccggctggcgtcgggcgagaatgcgcaggcattcttcgtcgatattgcgttccatctggttgatctggtcatcgatctcacgcacttgctgggccaggcccgagtcggcctcgatcagcgcggtgaccgcatcgttgacttgcttctccaccagcccgcccatcgccaggaggtggctgcgcacttcctcgagctcggcgttgaactgcgcggagatgtggtgggtaaggccttctttgctaatcatgttggcgtccttggagcgtccggtaaggtgcggagaaccgcagcgtcagtgcaatcagaaccacagcttcctagccgtagcgaccggtgatgtagtcttcggtctgcttcttcgccggattggtgaacagggtatcggtgtcgccgaattccaccagtttgcccatgtacatgaacgcggtgtagtcggaaacccgcgccgcctgttgcatgttgtgggtcacgataacgatggtgaacttggacttgagctcgtagatcagttcttcgactttcagcgtcgagatcgggtcgagtgccgagcagggttcgtcgagcagcaacacttccggctccacggcgatggtgcgcgcgatcaccaggcgctgttgctggccgccggacaggccgagggccgagtcgtgcaggcggtccttcacttcgtcccacaacgccgcgcctttcaaggcccactcaaccgcttcgtcgaggatgcgcttcttgttgatgccttggatgcgcaagccgtagaccacgttttcgtagatggtcttggggaacgggttgggcttctggaacaccatgcccacgcggcgacgcaactcggccacatcctcacccttacggtagatgttggtgccgtagaggttgatggcaccgtccacgcggcaaccgtccaccaggtcgttcatgcggttgaaggtacgcagcagcgtggacttgccgcagcccgacgggccgatgaaggcggtcacgcgctgcttggggatgttcatgctgacgtcgaacagcgcctgtttttcaccgtagtacaggctcaggcccggtacttcgatggccacggtttcctgggccaggctcaggctctgcttgtcgcgacccagggcagacatgttgatgccgtgggtgtgggtgtcttgttgcatgggatgctccctgtgctgttgtgtgggagggggcttgcccccgatggcagtgtgtcagtcagcacatctgtttctgatccgccgctatcgggggcaagccccctcccacatttattctgcgttcacttataaatcagctatccagcgccttgtacttttcgcgcaggtggttacggatccacaccgccgacaagttgagcgtggcgatcaccagcaccagcagcagcgcggtggcgtacaccagcggccgcgcggcttcgacgttggggctctggaagccgacgtcatagatatggaagcccaggtgcatgatcttctggtccaggtgcaggtacgggtagttgccgtccagcggcagcgacggcgccagtttcaccacgcccaccagcatcagcggcgccacttcaccggcggcgcgggccacagcgaggatcatgccggtcatcattgccgggctggccatcggcagcacgatcttccacagcgtttccgccttggtcgcacccagcgccagggagccctcccgcacggtgcggggaatccgcgccaggccttcttcggtggccacgatcaccaccggcaccgccagcagcgccagggtcagcgaggcccacaacaggcccggcgtaccaaaggtcggtgccggcagggcttcggcgaagaacaggcggtccaccgagccccccaatacatacacgaagaagcccaggccgaacacgccgtagacgatggccggtacaccggccaggttgttcacggcgatacggatgatgcgcgtcagggcgttctgcttggcgtattcacgcaggtacaccgccgccagcacgccgaacggagtgacgatcatcgccatgatcagggtcatcatcacggtgccgaagatggccgggaagatcccgccttcggtgttggcttcccgtgggtcatcgctgaggaattcccagaccttgctgaagtagaagccgatcttggtgatggtgcccatggcgtttggctggtaggcgtgcaccactttgccgatgccgatttccacttccttgccgttcgcatcgcgtgccgtcagggcgtcgcggttgaactgggcgtgcaggtcggccaggcgggcttcgatgtcctgataacgggcattcagctcggcgcggtcggcgtccatatcggcctgggcggcggcgtcgagcttgccttccagttccagtttgcggccatgcaggcggatacgttcgaggccggcgttgatcgcgccgatgtcggacttctccagagtcttgagctgggcagccagcttgttgacgcggtccacacgagcctgcagctccggccaggcagcctcgccttcggcaatgaccttgccatcctgcttgacgttgaccagggtgccgtagaagttgccccactcacgccgctcgatggtcatgagattcgctggcgtggtctggtccttgagccactcgccgacgatccaggtgaagtcgttgccgttcaggtcacggttgccgaccttgatcagctcgcgggtcatgaactccgggccttggtccggcaccggcaggccggcgcttttcaggcgctcgcggggcacttcttccttctgcaccacttcgccgatgacgatatggtttgcctggcccggcacgctgtagttggcctggatcaggtcggccggccagaagtggcccaggccacgcacggcaatcaccgccagcaacccaatagtcatgatgaccgcgatggacaccgcgccaccgctgatccagacaccgggggcgccgctcttgaaccatccattcagggagttctgtttcacagacttctacctttcttaaagcgacgagtatttcttgcgcagacgctgacggatcagctcggcgagggtgttcatgatgaaagtgaacagcagcagtaccagcgccgagaggaacagtacgcggtagtgactgccacccacttccgactcgggcatttccaccgcgacgttggccgccagtgtgcgcaggccttcgaacaggttcatctccatcaccggggtgttaccggtggccatcaacacgatcatggtctcaccgacagcacggcccatgccgatcatcagcgccgagaagatgcccgggctggcggtgaggatgaccacgcgggtcatggtctgccacggcgtggcgcccagggccagggaacccagggtcaggccgcgtggcacgctgaacacggcgtcttcggcgatggagtagatgttcgggatcaccgcgaaacccatggccaggccgaccaccagggcattgcgctggtcgtaggtgatacccaggtcgtgggagatccacatgcgcatgtcgccgccgaagaaccaggtttccaggtacgggctcatgtacagcgagagccagcccacgaacaggatcaccgggatcaaaatcgcgctttcccagccatccggtacacgcaggcgcagggattcaggcaagcggctgaagatgaagccggccaccaggatgccgatcggcaacagcatcaacaggctgaaaatccccggtagatgcccttccacatatggcgccaggaacaggccggcgaagaagccgaggatcaccgtcggcatggcctccatcaactcgatcaccggcttgaccttgcggcgcaggctcggggccatgaagtaggcggtgtagatcgcggcggcaacggccagcggcgcggccagcagcatggcgtagaacgcggccttcaaggtgccgaaggtcagcggggccaggctcatcttgggttcgaagtcggtgttggcggcggtcgactgccagacgtatttaggctcgtcgtagttttcgtaccagaccttgctccacagcgcgctccaggacacttccgggtgcgggttgtcgagcatcagtggttgcagcttgccgcccgcctccacgatcacgcggttggcccgtggcgacaggccgaacacgccctggccgtcgaccaccgggtccaccagcagggtgcggtgggcggtgctgtggaatacgccgaacttgccggacgcgtcgagggcggtgaagcctttgcggcgctcttcggcggtgatttcaatgatcggcgtggcgcccatctggaaggtacggatctgcttgaagcgctgctcgccatccgggtcgcgggccatgaaccactgggccaggccgcccttggagttaccgatgatcagcgagataccgcccaccagctgggtgctcgcggtgacttcagcattgccatcttccagcagtttgtagcgtccattgaggctcttgtcgcgcaggctgaacacatcggccaaagcacggccgttgatcacgtacagccattgctgacgcgggtcgatgaagatcgccttcaccggctcggtcatttgcggcagctcgatacgcttctgctcgctggtgacttcgccggtcatcatgttttcttcgcggctcagggacagcacgttcaagtgcgaaccggcggagcctgccaccaccagggaggagtccgtggcgttgagggccacgtgttccagcgggcggccggcgtcatccagcacgatcggcgtttcaccgtaggggtattcgatcgcgggggtgatggttttcttgccgtccgggtaggacaccttataggtgtggcggaacaccagggactggccgttggacagaccgaggatcaccagcgggctgccgggttggtcttcgccgatagaagcaacactggtgccggcgggcaggggcaggtcgacacgcttgagttcggcaccggtctcgacattaaagaacagcgcctggcccttgtcggaaacccgcatggcgacttggttctgttcttcgagggagatcatcagcggcttgccggcgtcctggatccaggccggggtcagggcgtcttccttggtcaacgaggcgccctggaacagtggcgcgaccacataagccaggaagaagaaaatcagggtgatggcgccgaggacggcgaggccgccgaccagcacgtaccaacgggtcaggcgatccttgagcgcgcgaatgcggcgcttgcgttgcaactcaggcgtattgaagtcaatgcgcttggggggagaagtcgtcgtcatggtggaattggccagatcattcatgcgcacaccctagcgatcctgtatgacagaaagatgacagtgcagtgacgcaacaaatccgccgcgaagcaaggctggcagcggactagaaaattcggatgcggggccggtacgccggccccgcagaggcaatcagttgccttctttcagacccaggtcagccaaggccttggcggcgactttggctggcagcgggatgtagccgtctttcacgacaacttcctggccctgtttggacagaaccagcttcacgaactcggcttccaacggggccagaggcttgttcggagctttgttgacgtacacgtagaggaagcgcgacagcgggtatttgccgttcagggcgttttcttcgctgtcttcgatgaagtcagtgctgcctttcttggccagagccacggtcttcacgctggcggtcttgtagccgatgcccgagtaaccgatgccgttcagcgaggagctgatcgactgcacgaccgacgccgagccgggttgttcgttcacgtttggcttgtagtcgcctttgcacagggcttcttccttgaagtagccgtaggtgccggacaccgagttgcgaccgaacagttgcaccggcttgttggccagatcgccggtcacacccaggtcgccccaggttttcacgtcggctttgccaccgcacaggcgagtcgaggagaaaatcgcgtcgacttgttccatggtcaggtgctggatcgggttgtccttgtgcacgaacaccgccagggcatccacggcaaccggaatcgcggttggcttgtagccgtacttctgctcgaaggccgccagttcggtgtccttcatcttgcggctcatcgggcccaggttggaggtgccttcagtcagcgcaggtggcgcggtggccgagccggcagcttgaatctggatgttgacgttcgggtattcctttttgtaaccctcggcccacagggtcatcaggttagccagggtatcggaaccaacgctggacaagttgcccgacacaccagtggtcttgacgtacgccgggattgccggatcaacaccagcggccaccgcgttggcggtcgcaacgccagcagcgacaaaagtcattgccgccatcaaacgtttcagtttcatgccttgctcctagcagattgggataattggatcggggccaagtatcgggaggccgtgtgaacactctatgtctggaatgtgacagttagatgaaaggccactattgggtgaggatttgcatttaagaagaaattttcagaaatgccggcctgagcgggaagataagtgtgataaggctctggcttgaaaccatgctgcaattgctgaccggagatttcccacagctttttagggttgtcgctcggaactggccttaataacctcctcctgccgctgcaaattcagcgaccgggactgcaagcccgccgaaactatgttgggagttcataagcgcctctataatcggagcgcttttatggccgtcgctttatggcggctgtgtgcgggagaccttcgggtctgccgggatgctcctaacctcggtcttgcagacccgcgcacagctgccacccatcatctgcaagtgatgctggccgctcccattttgttaggagcttttacgatgatcaaagatagccccaatcccccgctcaattcggctccactgcacgcagacgctcacagagccatcaattccaatccgacacgttctgctgaatccaccctatctgctgatgggctttttaccgtgcgtacagatctggatgccgagaccctgctggcaaacgcgtcccaggatctcacctcggtacaagtcttggctgcaaatttggcgttcgaggtcgacggtgctgcgcgagacgtggcgctgggaatatgccggatgcttgagggaattcagttattggtagatcggacgctggatcaatttgaaactcaaaacccgatggcaaaattatgaaatccgctccggtccaaagcctggttaaagtctgagcgattcacggcgaaccttaggttgacaaaacaaaaccaaagcatagtcttgtcaacctaaggagacctcacatgatcaatgaccgaattcgccgcgcaaggttattgcgtggcatgtcgctagaagcactggcactgcatctcggtgacataaccaagcaaggcctgagcaaatatgaaaaagggctgagtaccccaaactctcagcgtcttttgcaattagcaaaggcactggacgtgagcccggagtattttttccgcactcaggcactcccactcgcgccgctcgagttccgtaagcttgcgaagatgcctcagtaccgtcaggttcaagtcgaggagcagattcgagagcatctggaacgctatatatctcttgaagagtgtttcgacccaggagatatcaagactgccgaaaccccagcgcaaatgctccctgtgtcctccttagaagaagcggaacgagcggcggatgagctccggaagtattgggatataggcgaggaccctattgctcatctgactgagcagttggaagagcacggcatcaaagtggtgatgctggatggtcctgatgattttgatggcgcttgcgcagccaccaatgacggcgaacatgtgctgatcgctctaaatgctcagagagcaggtgaacgaattcgcttcaccgctgctcacgaattgggtcactgggtgatgaaattgcctgatgatatgcccgagcgcgataaagaaaattgctgtcaccgcttcgctggggctttcctttatccagctaaaagcgtgaccggagattttgggaatcaccaacgctcccgtgtccaccctagagaactattgattgctaagcgccaatatgggctctcaatgcatgcagcgctccgtcgattgaaggaccttaagctattaggcgaaggcggcttcaagtccctgactattcagttcagtagcaatggctggcgcaaagcagaacctgaaccattaccttgcaaaccacctcagcgttttgagtctctcgttttctgggggttagcggaaggtctgatcaccaaatcaagagcggccgagttgctgcgtcgcccggtgagagctctagatcccaattttctgggctcattggagagtgcatgagccttatctatatcagcgacaccaacatctggattgatttcaggaatgcgggattgctggagcatatattcaggctgccactcactttctgctgcaccgactttgtcatgcacgagcttgaggatttcccccatgatgaactactcacccaagggttggttgtcgaatcatttgacgagggaggagtgaaaaaactcttagggcttaaggtcgaacacaataatagttccttagccgatgtttcttgctacctactagcacaaacaaccggaaggccgttactcactggcgatggaaaactacgtcgtcaggccattcgggatggactacaggtacacggcgcactttggctgctcgacctaatggtcgagcatcaagtcctcaatgctattgacgcagcaacggcgttggagcatatgctaactgatggcgcccgcttaccagcatcagaatgtcaaataaggctcttaggttggagacctatatgaagctcaacccggatactgaatatccacccagcggttgtaaacatcaccatactcaccttccaaagcagaaaacttagtttcaaaaagctccatggctttgattgcgtcagctgacggataactcatgaagcgataccccgtcattaccctaaatttgaaatatccgaatccgtctgaaattattcgactgagatgagccaaatgaattgagtccctttcatcggcgcctcggaagtctcgctccatcggcattccaaccccaatgcagtcagcatgatgtatatgactagcgttcgagtattcatgtagcaacgctgcataacctttaaacaacgggtcgccactattcgtgagaccggcaatcaaaccagtgaacccccatctgcgctcaagttcttgacgagtttttctatcatatttctgatttacttcagctcttttttctggcgaaattaaaagatccttgatgggtttccactctcggtcatcaggattcgtcacagaattcaaaagctcttgagccttactatcgtttttcaataatgaaatttcaaaaaggtcagtatcaaactcttcaattcgccgcctaaaactctcacgcgactggagtatatacaatactttcagtgtaccctcgcacaccgaacgcatgattacatccgcatcccaaagttgaccgtaagcagacaataaaaatgcgctttccgtagatcgcgctgtcgccgataaaagctcaccgagaacttgccgttctcgcttgctgaattcagaaaaagctgacactggaaccattagtggcagcaactccctcattaacaaaaccgctttttcggaccactctttctgaattttaattagtacttccgtgtacatagactactcctgaacagactaccgtccgcgcttccacagatacccacccaccaccatccccatcacgcacagggcggcaacgtagtaggccgggcccatcgggctttccttcatcagcagcgacaccaccagtggcgtcagcccgccgaacacggcgtaggccacgttgtaggagaacgacaagccactgaaacgcaccacgggcggaaaggccttgaccattacgtaaggcaccacgccgatggtgcccacaaagaggccggtcagtgcgtacagcgggaacagccagtctgggtgggccatgaggctgtgatacagcgtccaggatgtggccagcaacagtgcgcaaccagcgaccagcacacggcccgcaccgaagcggtcggccagggcgcccgaagcgatgcaacccaggctcagggtgacgatggccaggctgttggcctgcaacgcaacggtcgggctgaagtggtagatggtctgcagcacggtcggggtcatcaggatcaccaccacgacgccagccgacagcaaccaagtcagcaacatcgacaagacgatggcgccacgatggtcgcgcagcaccgcgcgcaagggcagctcggcggccagggtcttgcgttgctgcatctcggcgaagatcggcgtttcatgcaaccagcggcgcaggtacaccgacagcaggccgaatacaccgccaagcaggaatgggatacgccaggcataatccgaaacctgctcagggctataaatagtgttgatggcggtggctaccaatgagcccagcaggatgccggcggtgaggccgctggtgagagtgccgcaggcgtagccgatatggcgtggcggtacgtgttcggagacgaacacccacgcgcctggcacttcaccgccaatggccgcgccttggatgatgcgcatcagcagcaacaggaccggtgcccacaggccgatctgcgcgtaggtcggcagcaggcccatgatcagggtcggcacggccatcatgaagatgctcagggtgaacatcttcttgcggcccagcaggtcgccgaagtgcgccatgatgatgccgcccagggggcgcgcgaggtaaccggcggcaaagatgccaaaggtctgcatcatgcgtagccattcgggcatgtcgaccgggaagaagagttttccgaccacggtggcgaaaaacacgaaaatgatgaaatcataaaactccaacgccccgcccaaggcagacagcgacagggttttgtagtcgttgcgggtcagcgggcgcgacggttgcgcactgcttgcgggcacggaggacatggcaaggcttctcttatagtagtcgggacggcaagcccgggacttgcggcaggcttggcaagatagcaaatcgctcgaaaaagcacagcgttgagcgaataacagttcaacagcgcgaaatattccgcatttttacgctttatctgcgcacagaagcacagttgccggaaaaagccgcgatacagccgttatttgccgaccaaatgagcgcccagaggtcgtcgtggcgccggggtctcgatatactcggcccgtgcaagcgcaagacccccagtcttgaggggctgctgtgccaaaacgtcgttgggcacccaccagccgatttggcagagtttccctttagtacgccttacgagaaacgcatcacgcggtgtatgttggtgctgaaacgtttttttcgaagacggctatccacttgaaatacccatgaagcgttacgggtcagaggcacccttggcatgatcgaactcgaacaagaagatcctatcccgcaaggcgatctcgccctgcaaatcaccgccctgccgcgtgaaaccaacggtttcggcgatatcttcggcggttggctggtcgcacagatggacctggccggcaccgccatggccagcaaggttgcaggcgggcgtgtcgccacggtggccattgatcgcatggcgttcctggtaccggtggccgtcggcgcgcagttgtccttctatacccaggctctggaaatcggccgcagctcgatccagatgatggtcgaagtgtggagcgacgacccgctgtccagcgaatggcgcaaggtgaccgaggcggtatttgtattcgtcgccatcgacggcagcggccgcacgcgctcggttccatcgcgcgcacgttaaacctcgccgggttttgacggtcaattgccccactgcctgctattgagagtgctttgttatgccgacgccccacgttgaaaccgtgaaaatcgacgagctggactgctggcgcatccgccacaacggcgcggaactgatggtggcccaacagggcgcgcatatattcagttaccagcgcgacggcgagcagccgctgatctggccgaaccctgaagcggtgttcaagcagggcaagggcattcgcaccggcgtaccggtgtgctggccgtggtttggcgtgttcgaccgcaacccgcagagcgtcaaggcgatgcgccagagcgaccagccggccggcgcccacggttttgtgcgtacggcactctgggaattggctgcgacggaactcgaaggccatgcgctacgggtggatttgctactgccggtgccgacgggcggttttccgggctggccgcaccaggtcgacctgaaactgagcctgctgctggacgatcagttgcatatccgcctgaccagtcataaccgtggcgctgacaccgtaaccctcagccaggcgctgcacacctactttgcggtgagcgatgtgcgcaatgtagaggtcgatgggctggacggcgtgacgtatatcgataccgcggacggctgggccgagaaggtgcaatccggccagctgcgcttcactgccgagaccgatcgcatctacctcgatacgccgtcccagttgaacatcgtcgacacagactggcagcgccgcatccagctcactgccgagggctcaaagtcgacggtgatctggaacccctggaccgaacgtgccaaggcgtttgatgacatggccgatgatggctggccgggcatgctgtgcatcgagacggcgaatgtgctggacgatgtggtgagcctggcgcccggcgaaagccacaccttgggtgtgaggatcagcgctgtcgccctgtaagaacgccaatcaaaatgtgggagggggcttgcccccgatagcagtggatcagtcagcacaacggctactggtagaccgctatcgggggcaagccccctcccacattggttatatgttgccctttaaagatcggattccttgaccacccgcactttccccgcatccagcgcataggccgcatcggcaagatcgttattgaccttctccaccttcaacgtgcccgtgacccacagcggcgtgtagatatcatccagcttcagccccttgggatagcgcaccaacaccagttggttcggcggcggaggcggcacgtggatgcacgcgcctgggtacggcaccaggaaaaacaacgtgctgcggcctttggtatcagtttccaacggcaccggatagccgccgatgcggatgtccttgccattcatggccgccacggtcttggttgagtacatcaccgccggcaagcccttgctctgcttcaggccacccttgtcggtgaatgtgccttgggcttcgggggagttgtggtcgatctcgggcatggcttcgagggctttttgatccgacagcggcatcaggtcgagccagtcggtttccggcagttcgccagcgtgcgccaggccagagcccagcaggaggagtgttaacaaaagacggcgcatggagaggctcgacaagtacaggtggcgagcattctagctccctgcgcctgcgcagcgcagagagcttcgtcgcttagatcatttctttttcagcaggccgtagatcaccagcagcacgatggcgccgatcagcgcgccgaggaagccggcgccctggcctgcctggtagatgcccagggcctggccaccgtaagtggcgaccaacgaacctgcgatgcccagcaggatggtcatgatccagcccatgctgtcgtcgcctggtttcaggaaacgcgcgagcaggccgacgatcaagccgataaagatggttccgatgatacccatggcatttccctctgaatgtaggtgagctatgccaaagcctagtcaggctttggcatcctgcaatcagagagacgacggtcaccaatggttcccgtcggacttgccttattgctcggcgatcagcgcttcaaccttgaggatctgcgcttgcagcgtcgcgcggtccttgcagcgcaggttggcatggccgaccttgcgcccggccttgaaggccttgccgtagtgatgcaggtggcagtcgtcgacggcgatgactttttccacgggtggcaccacaccgatgaaattgagcatggcgctctcgccgaccttggccgtggagcccaacggcaagcctgccaccgcccgcaggtggttttcgaactggctgcactcggcaccttcggtggtccagtgcccggagttgtgcacgcgcggggcgatttcgttggccttgaggccaccgtcgacttcgaagaactcgaacgccatcacgccaacgtaatccagttgcttgagcacacggctggaatagtcttcggccagggcctgcaacgggtggtcggtactggccacggacagcttgaggatgccgctgtcgtgggtgttgtgcaccaacgggtagaagcgggtttcgccatcacgggcacgcacggcgatcagcgagacttcaccggtgaacggtacgaaaccttccagcaggcaggcgacgctgcccagctcggcaaaggtgccgaccacatcggcagcggtgcgcaggactttctggcccttgccgtcataacccagggtacgggttttcagcacagccggcaggccaatgctggcgacggcggcatccaggtccgcctgggactggatatcggcgaaggccggggtcggaatgcccaggtccttgaacatgctcttctcgaaccagcggtcgcgggcgatgcgcagggcttcggcgctcgggtacaccgggacgaactgcgacaggaacgcgacggtttcggccgggacgctttcgaattcgaaggtcaccaggtcgacttcgtcggccagttggcgcaggtggtccgggtcgctgtagtcagcgcgcaggtgctcacccaaggccgccgcgcaggcgtccggcgccgggtccaggaaagcgaagtccatccccagcggggttcccgccaaggccagcatgcggcccagttggccgccaccgattacaccgattttcatcgtcaaccacctcaggcgatgcgtgggtctggattgtccagcacgctgtctgtctgttcagcacggaattttttcagcaccgcgtggaactgcgggtgcttggcgcccaggatgctggcggacagcagggcggcgttgatcgcgccggccttgccgatcgccagggtcgccaccgggatgccggccggcatttgcacgatggacaacagcgaatccacgcccgagagcatcgccgactgcaccggtacaccgagcaccggcaggtgggtcttggccgcacacatgccgggcaggtgcgctgcaccgcccgcaccggcgatgatcacctcgatgccacgggattctgcttcatcggcatactggaacagcaaatccggagtgcggtgggcggagaccactttcacttcgtagggaatgccgagtttttccagcatatcggcggtgtggctaagggtggaccaatcggacttggagcccatgatcacgccaaccaatgcactcatcgtcgtgcctcttctctctgggcgcccgcaggcgcgtcaaaaaacaacaagccacgcgggaaatccggcgtggcttggtgtacgaattaaggccggttggaccggccgaaggccgcgcagtataccgtaataatccagataaacagcccctgggatgaccatctgtcttaagcgccaaagcggcagatttactgacttgcaggtcaacccggcggactttcaagaacatggaaacttcaccccgccaacatcgaatgccactaccgcatttgcctatgacaccgacaggcaatggcaggacccagccttatcgtgggcagcgacacaccccactgacttccccaaggacaaggactgccccatgcctgcatcggtcgagtattaccgcaccctacccgcgccccacgacatcctcaacctgacaccgcccgaaacggccacattgctgaggtcgctgaacaaaaacgtcacttacacccttggtcatatgccaacccgtccagtcagtgcgcttaagctgctgacccaggtactcacgcactccctgcccacgcccgaactggactgcatcttcttcgcctgcccgccatcggacgctaccccgcaacaaaccttgtacgagctctaccacaacctcgttctgttcaacgcgctgccctcgacctacgacgccagtacggcagtgttctacacccccggagcagacgccttgcaagccctgccgtccgactgccagacgcgattaaagatagccctgcagaacctccagggtatcgagttctacctgagtgacctcgccgacttctggcaagcccggcacgcctacgccgacatgaccaaccaggcgtacgtggcccgagccttcgcggcccagcttcagtgtgcggcatcgctcaggctggcagatggttcgctggaccatgaaagtgtcgcgttgatcacgcttctggcgtcgcctgggcatatttccggttgccatctctaccgcatcgcgtttcaggatgaagaacaacaggcgcacatccctctgtacggcgccttcctgatgacccgcactcccgccagcgcagtactcggtcaaaacccctgtgtcctttacgtgcccgggctcaagttgcaggcgttctactcgccggccctgctcagggcccacctgattgccgagttgagcgagaccagcctccaccgtctgctgccgtgtatcgaccgcaatcaactccagcgcttggaagagctggccaggcacgggctgcgggacgatcacgtcagcctgtcaccgatggtgttcagcccgcacttctatgaggacgtgaccctggcgctgatcaaccagcaacgccgagacatccggcacgcgtgggcatgggcgcagcctcggcatttccaggaggccaattggatcaaccgtcacatcgaggccgcctcggacctcaggtcattgatgacccttgaaagcaccttcaaagaccacacgacacccgccatcgcggcgtttgaacgaaaactgccgccccgcccagcgcccattcctgaacctgccgcgccgaagccgatcaacctgaacgtctacatccatcgtgatttgcacggcgatagccggctgtcgtccctgcgcgaagattatttttcctggctgcaaaccgagctggaagacctgtccggccggacagtcatgatcaccttccatcaggaaaccgggccagttgctttaatcgatttcaattacaaaggggacgaacaaaagagaagctctgcctggaaaaaaacggtgctccagtacctgcaaaacctttcgaccacccattcaccgcttgacctgtacctactgctgacaggtgacaacatcaacagtagagtcgccggcattgctaatgtgcgtggaagcttcggcattgccgcgacaacgtcataccgcatcgcagcccatgaagtcgggcatatgctcggcgcgctgcataaagacggcgacaatattttcaatggctggtggcacgaaaccctgatgaagaatcgtgactttttctcgttcctgaggggcaacgcctaccggttcagcgacaagaaccgggacaatatccgcacctacctgagccagttcgattgacgcacggctatacggcggggctcgccgccccgccttcgagcttgcgccacagcaaccgcacgttcgccttgcgtaccaaggcacagcggtacaggcggatttccagcggcacatgccattgcggcccgccgcacaccaccagctcaccccgcgccagctcggcgcgcacgctcaactgcggcacccaggcgatgcccaggccttccagggccatgctcttgaggctgtcggccatggcggtttcgtacacggtggtaaagcgcagcgcacgctgacgcaacagcaaattcaccgaacgaccgagaaacgcgccggcgctgtaggccagcaatggcacgctgccctcgccttccaggtcgaacagcggtttgccgtcggcatcggcggcacacaccgggagcatttcggtattgcccaggtgcagcgacgggaagatttccgagtccatctgcatcgcggcgtcggggtcgtagaacgccagcatcaggtcgcagccgccctcacgcaaagcatgcacggcgtcaccgacgttggtggccaccagccgggtggcgatgttcaggccttcgttgcgcagttgcgcgatccagcgcggaaagaagcccagggccagggagtgcgccgccgccacttgcatgacctcgccctgcccgccttccaggtgatgcaaatggcgcagcacttcaccgagctgctcgaccacggtgcgcgcggtgaccaggaacaactggcccgccgccgtcagctccaccggcgtgcgcgagcggttgaccagggtcaggcccaacgcggcttccaggctgcggatgcgtcggctgaacgccggctgggtcacgaagcgccgctccgccgcctgggaaaaactgcgggtcgccgccagggcgctgaagtcttccagccatttgctctcaaggttcattgctgcctcccgtgggtacgcaccattttggcacacacgcccgccatgataaccgggtcacactcacattatgccgtttgtgcataggccagtgcttaacagcattggcccaaaaagttctacaagcctagcattcgcagcgttccggccagttccgggtccatatcgagatgatttccgtcatgtcctccgctgcatctttccgtaccgaaaaagacctgcttggcgtactcgaagtaccggctcaagcgtattacggcatccagaccctgcgagcggtgaacaacttccgcctctcgggcgttccgatttcgcattacccgaaattggtggtcggtctggcaatggtcaagcaagcggcggctgacgccaaccgcgagttgggccagctcagcgaagccaagcacgctgccatcagcgaagcctgtgcccgtctgatccgcggcgatttccacgaagagttcgtggtggacatgattcaaggcggcgctggcacttcaaccaacatgaatgccaacgaagtcatcgccaacatcgcgttggaggccatgggccacaacaagggcgagtaccaatacctgcacccgaacaacgacgtgaacatggcgcagtcgaccaacgacgcctacccgaccgcgatccgcctgggtctgctgctgggccatgacgcgctgctggccagcctcgacagcctgatccaggcgttcgccgccaaaggcgtcgaattcagccatgtgctgaaaatgggccgcacccaattgcaagacgccgtgccgatgaccctcggccaggaattccgcgccttcgccaccaccctgggggaagacctggcgcgcctgaaaactctggcgcctgagttgctgaccgaagtgaacctgggcggcaccgccatcggtaccggcatcaacgccgacccgcgctaccaggccctggccgtacagcgcctggcggtgatcagcggccagccggtcgtgccggctgccgacctgatcgaagccacctccgacatgggcgccttcgtgctgttctccggcatgctcaagcgcaccgcggtgaagctgtcgaagatctgcaacgacctgcgcctgctgtccagcggcccacgcaccggcatcaacgagatcaacctgccggcacgccagccaggcagctcgatcatgcccggcaaggtcaacccggtcatcccggaagccgtgaaccaagtggcgttccaggttatcggtaacgacctggccctgaccatggcggccgaaggcggccagttgcaactgaacgtgatggagccgctgatcgcgttcaagatcttcgactcgatccgcctgctgcaacgcgccatggacatgctgcgcgagcactgcatcgtcggcatcaccgccaacgaagcccgctgccgcgaactggtggagcactccatcggcctggtcaccgcgctgaacccgtacatcggctatgaaaacgccacccgcatcgcccgtatcgccctcgaaagcgggcgtggcgtgctggagttggtgcgcgaagaaggcttgctcgacgacgccatgctcgacgacatcctgcgccccgaaaacatgattgccccacgcttggtcccgctgaaggcctaagcgtttgttgcaccgctcaccaggttgagggactagacacctctcaccttttgagggcctgaaggctcgttcttcaggcccttttttttgccccgaggttgtgaaatgaagcctataaaaacgccaatatcgctctgtaagtccaccacccagctgaaacctttaatcgccccgagcagacggatcacgttcgcctaggtatagtgccgcccctcttcgcgtcagagatcgtcggtaacgaggtcctggacagcgcgaaaccgcatgaataacaacacccgcaaaaggattggggtcgaagcgtcgtgcactgcctggtgctgagcgatagcgtcgaaccgtcctgcgtttgccattagaaaaatcagcgaggaacactccatgctcgaagtcatcaacgacttcctctcagggaaagtactgatcgtgctcattgtcgggctcggcggttatttcacgattcgctcgcgtttcgtacaactgcgtcacttcttccacatgttttcggtatttcgcgacagcctgaaaaacagctccgatcagctcagctccttccaggcgctgatgctcagcctggccggccgcgtgggtgccggcaacattgccggtgtcggtattgccgtgacactgggtggcccgggcgccgtgttctggatgtgggtcaccgcgctggtgggcatgtcgtcgagcttcatcgagtgctccctcggccagttgtacaagcgcactgacgccgagggcaccttccgtggcggcccggcctattacatccagcacggtttgcacaagcgctggctgggcatggtcatggcgttcctgttgctggtgaccttcggtttcgctttcaacggcctgcaagcccacgccgtgacccactcgctgaacaacgccttcggcctggacaccacctacaccggcctggccctggcggtactgctgggcctggtgttcatcggcgggatcaagcgcatcgcctcgattgccgacctgctggtgccggtcaagaccctggtctacatcgccgtaaccctctatgtgatcgtgctgcaattcgaccatgtgccggccatgctcgcgaccatcgtcaagagcgccttcggcctcgaccaggccttcggtggcctggtgggcagcgcgatcatcatgggtgtgaagcgcggcgtgttcgccaacgaagccggcctgggcagtgcgcctaacgtggcagcagtagcctcggttgagcacccgatcgcccagggcgtggtccaggcgttcagcgtgttcctcgataccttcgtgatctgcacctgtactgcattgctgatcctgctctccggcttctacaccccgggctttgaaggcgacggcattgccctgacccagaactccctggcggcggtggtcggcgactggggccgcatgttcatctcggtggccctggcgttgttcgtgttcacctcgatcatgtacaactactacctgggcgagagcaatctgcgcttcctggtaggcaacaaccgcaaggtgctgatgggctaccgcgccctggtgctggtgctgatcttctggggttccatcgagaacctgagcaccgtgttcgcctttgccgacatcaccatgaccctgctggcgttcgtcaacctgttcgccctggcgttcctgttcaagatcgccatgcgcatcctcaacgactacgacaaccagcgcgcagcgggcatcaagaccccggtgttcgactccagccagttccctgacctggacctggaccgcaaggcctggccggccaacccggtcaagcctgagccaggcactcaagcaagcgctgaactgaacgctcaagcgcaacgctgagcgtagatagatgacacgccgcccggccttgggcatgctctgggcccggcggcgtttttcgttcaggagaaaattcgatgtccccagctaataacgtgatggtgctctacaccggtggcaccatcggcatgcaggccagtgccaacggcctggcgcctgcgtccggttttgaagcacgcatgcgcgaacagcttgccgacgtgcaagtgcccacctggtgctttcgggaaatgtcgccgctgatcgacagcgccaatatgacccccgcctactggcagcgcctgcacgccgccgtggtcgaagccgtggacaacggctgcgacgccgtactgatcctacacggcactgacacgctggcctacagcgccgccgccatgagcttccaactgctcggcctgccggcgccggtggtgttcactggctccatgctgcccgccggtgtgcccgacagcgatgcccgggagaacgtcagcggtgccttggcggcactcggcgaaggcctggcgccaggtgtgcagttgttcttccacggcgcactgatggcgccgacccgctgcgcgaaagtccgcagctttggccgccatccgtttgctgccctgcagcgcaatggcggcgtcgcccaggccgaaatgatcccggccgccctgcattaccgccagcccaaagccgtggccaacgtgggtgtgctgccactggtgccgggcatcgccgccgggcaactggatgcactgatcgacagcggtatccaggcgctggtgctggaatgcttcggcagcggcaccgggccgagcgacaacccggcgttcctggccagcctccaacgagcacaggatcaaggcgtggtggtggtggcgatcacccaatgccatgaaggcggcgtggaactggatgtgtatgaagcgggcagccgcttgcgcggcgtcggcgtgttgtccggtggcggcatgacccgcgaagcggtgttcggcaagctcaatgcactgctcggtgccggactcgacaccgctgaggttcgccgcctggtggaactcgacctgtgtggcgagctgagctgatcggcctgtaacttgcttcccttccagccatcccctggctggaagcaccccatgctgcactcccacctgaccaccctcaacgccgtatccctggtgctcaacgccttcaaggccgaaggcttgccggcccaggaactgctggccggcagcggcatctgtgcggcggacttgagccgcgccgacacgcgcatcaccaccaaccaggagatgcgcgtgtgcgccaatgccgtggcgcggcgccgggatatcggccttgaactgggccggcagatgcatgtatcggcctatggcatgctcggctatgccctgctcaccagtgccacctttggtgacgccttgcgcctggcgttgcactacccggcgctgttgggaacacttttcgagttgagcctggaggaagacggccagcgcgtgtggttcaccgccggtgattatcgagaagacccggcgcttgagcgattcaatgtcgaactgtgcctggcctcgctgaaagtcatctgcgacgacctgctgggccagccactgccactgctcggcgcacgcttcgagcacgccgccccggactaccgcgcgcgttataccgaacgcttcccttgcccgttgcagttccaggccaccgccaacgcgtttgccttcgaccggcactggctcgaacaaccgctgccgctggcagacaccgtcacccaccaggccatggctgagcgctgccgcaaacagaacctggagttcaccgggcgccaggcctggctgggcaggattcgccagttgctcactgcgcaactcaacgccgcgccgggcctggaaggcctggccatgcagatgaactgctcggcgcgcaccctgcgccggcatttgcacgacctgggttgcagctaccaggagctgttggacgaggtgcgtttcgagcgcgccaagcaactgctggctgaggaccagtggccgatctaccggattgccgaagcgttggggttcagcgaaacggccagtttccggcatgcatttgtacgctggagcggcgtggcgccgagccaatttcgagcatgatgcgccattgaggggcgaattacggacaaacaatttggccatattcatccccttttggccgctcctgccgttctcttaaaccgcgcccaccgcaagactgcaggcaccgacccagcctgcggagaacaagaatgctgacgatctattcggacgatcaccacctgcaccacggccgctgcgaactgatggacgggcaactgatgccctgcttcgaaatgccctcgcgggccgaccatgtgctgcaacgggtcaaagaccgcgaactgggcccggtgcaggcgccacaggactttggcctggcgccgttgcaacgcatccacagccgcgattacctggacttcttcaaaggcgcctgggcgcgctggaccaaacacggccaggacggcgacctgctgccctacacctggcccgcgcgcaccctgcgccgggtgctgcccaccagcctgcacggccagttgggctactacagcttcgatggcggtgcaccgatcactgccggaacctggcaggcagcctactcggcagcacaagtggcgctcaccgcacagcaggcgatccagcacggcgcccacagtgtgttcgcgttgtgtcgcccgccggggcatcacgccgccagcgacttgatgggcggttattgctacctgaacaacgcggcgatcgccgcccaggcgtttctcgaccagggccaccgcaaggtcgcgatcctcgatgtggactaccaccacggcaacggcacccagtcgattttctacgaccgcagcgatgtgctgtttacctcgatccacgggcatccggaggccgagtttccgttcttcctgggctatgccgatgagaggggcgaaggcgccggggaaggcttcaacttcaactacccgctgcccgccggctccggctgggacacctggagcgcggcactggagcaggcctgccgggagatcgaacactacggcgccgacatcatcgtggtctcactgggcgtggacaccttcaaggatgacccgatctcacagttcaagctcgacagcccggactacctgaccatgggcgcgcgcatcgcacgcctgggcaagccgacgctgttcgtgatggaaggtggttacgcggtggaagaaatcggcatcaatgccgtcaacgtgctcgaaggttttgagaggtcagcccaatgaacatgctcaagtcgcttgtgctctgcgccgccgtgctgagcagcgccgcgtacgccgaagaaaaaaccctgaaggtgtataactggttcgactacatcacgcccaaggcgctggaggacttcaaggcgcagaacccggcgatcaaactggtctacgacatcttcgacaccaacgaagcactggaggccaagctgctgaccggtaactccggctatgacgtggtggtgccgtccaacgtattcctcgccaagcaaatcgaggccggcgtgttccagcccctggaccgcaaccaattgcccaactggaaccacctcgatcccaagctgatgaagctgatcgaggccaatgaccccggcaataaattcgccgtgccctacatgtacggcaccatcctgatcggcttcaacccggccaaggtcaaggccgcgctcggcgacaacgccccggtggacagctgggacctgatcttcaaggaagagaacatcagcaagctcaagcaatgcggcgtggccctgctggactcgccttcggagatcctgccgctggccctgcagcacctgggcctggaccccaacagcagcaaccccaaggactacgtcaaggccgaggcgctgttgatgaagatccgcccgtacatcacctatttccattcgtccaagtacatggccgatatcgccaacggtgacatctgcgtggccgtcggttattcgggcagtttttcccaggcggccaaccgggccaaggaggccaagaacggcgtagtcgtcgacatgcgcctgcccaaggaaggcgcgccgatctggttcgacatgctcgccattcccaaaggcgcgcagaacccgcaggacgcctacacctttatcaactacctgctgcaaccccaggtgatcgcgccgatcagcgattttgtcggttaccccaacccgaacaaggacgccaccgggcaggtcgacccggcgatccgcaacaaccccaacctgtaccccaccgaagcagcgatggcgaccctctataccctcaaacccctgggccgtgatgccgagcgcgccaggacccgcgcctggaccaagatcaagtccggcacctgacgggcctacataaacaccgcctgcctgactgcgcgctttctagcatggctacacccggggcctggcctcgggttttgtccatcccacgcatgtcaggctcccctatgacttcaacccaaaaagcctctgccacgcagcagccgccgcgctactactccaccgccaccttgatcactcaactgtccaccggcccggcgtttcgggaagtggccgccgtattgctgcgacgtgaactcaaggcgcattacccgaacctggatatagacccgaacatcaccctggtggaattggccgatcgcgaatcggtgtccaacgccgacgcacgctgggccaccttcaagcacaccggttggttgatcttcaacgcggccttgccattccttggttcgacggtgggggggcgcggcgtggatctggcaaatcatggatcaactgcaagaagtcgtggaggccgaaggcgacccgcaacaccgctcacgctggagcgccatcgccgatctgctgctcaacctgggcatggcgatcacgttgcaccgcgtgaccctgcgcccgttggagtcagagcctcccaccctcgccaagctacccaaaccggtcgagcccaagccggtagaacggattgacttctacctcagcgagatcggcctggagccggcgagccggctgtttttcgagaagaaaaagacctgattccgccgttacttatctaccgtcccagccactcctgctgtcgctaccgtgcgcgttcgctgttcgccctggccaacgacagaaggagccgccaatgtccaaaaacgcgcacaacaacaataaccacaccctgaacgggcgccccaccaacgcctacgaattactcacccaattgaccaccggcccgtctgcccgggaagtggcgtcctacacccttcgctgggtactgaaggagcagtaccccacgctcaatatcgacccggacctgacgatgatcgtcactccgcgctggcatgttcttgagtcggtcatcatgccggttccgccccacgtcgaatccatcacgacggtgttggcacgccagatgctgtcgcccacccctgtgttctaccttgagggcgagcacttcctcacgctgcatcctgagtcccccacagccgtgcacttgccggtgaaaatcgatgccatcgcacgcctgatcaatgagttggccggcctgctgttcgccgccttccaggagcgccaactggactactggaatgcatcgaacggcaacagttggccgcgttggcagaccttctcccattcattgcgcaagtcctggaatgtcaccaccgttgaagactgggatgtgcttgagtgtgaaatggccagagggctttatcggtttccattgcgcgcccaacgcagggtcaaggatcgctacaacagccgcgcctacgtggtggatgtcagcctgctgcgcgacgacgtcaccgtgcatgtgggggtgctggatatggcggtgctgatgggtgagttcaacgaacagacgatgatcctggcgtactcactggtcagtggctacgagcgcttcggatctctcgaagagctgggcaaggcactgccggccaaggtcgtgcaactgcaatcggatacaacattgcagtggaagttgtacgagcccgccgacagctttttcgacagcctcgcctgtgccctgatagccatgcaaatccaagccatcggtgaggccgagaggttcgttgccgcttccaccgcaccgcagcctgagatgccaaccactctctcccggattgtgcccagcattgaagacctgagcgaccatgcgctctcccatatccgccagatacatcaacaaatgccggactggctggccaatgcttcggaccaggacatcgccctctacagccgctacatcattgaattggcacagatccacgcgttcaacgaaggccgttcttttcaggacggaatcccgccaatacgcgactacgcccttgagaagctgcaggagcagatccgcgctcacaaagaaggtgcacacctgaacctgaacaaggttgcagtgacgatccagagcccagtgatctggggcaccttcgcaataccgggcgaggtggatgtgacccagcgcagcctgatcgacctggtcctagagaacctcaccggcctgcccaccggccaacccacggtgtactacaacggttcagtggcgccgcaatggttgaacttcaggttcctgaaggaggtgatcggcacagtcgatatcggcgaacactacccggcgctgatcaagagcacgttgctcgacgacccggtccagtcaagggccaggcaattgctgtacatcagtcatttacgcgtgcaactgccactgttggctctgcaattgaagatccagcaacgccagggcatggacgaactcggctaccgctatgtcgccgcagtgatgcaggtagagaagcaagaccagcaggttgacgggcagccgatcgtgatccgaccgcttgcctttgtcccgacattgcgcagcggcattcagggggatgaagtcgccaatatgtttgtgatcggcccgctggacccttccgccggcccctgcgtgctgtaccgccccttgctcgaaccagtgcttgcccagttcccatcccggcaaaacctgctgtacatgatcaagcaggaccaagacctgcgcgaatcagtgctggcctggttacccgaagacgtccgcttcaactacgagcagtacgtgtttcccgacaccctgccgtcgccttggaccgttgtgcgagtgattgtcgagccggcgacggtggtggatatgagcggacctatcgaattgagcgacgacgtgttgggcgacggcgccctgatcacgctgttcaaggccaacgccaacgcgatggtcgagttggcgacccgtcaatcgatctccaatgagcagaagcgctgggcgacctttcgccagaccggctggcagatcttcaacgccgtgctgccgtttctggggcctaccgtgggggttgccgcgtggatgtggcaaatcatggaagacctggagcaggccgagcaggcggtggacaaatccgacaaatccgagggctggaacgcgctcgtcgacctgtggctcaacctcggcatggcattggccctgcacgtagggctgcgtcatccaacccgtgagcccgtgaccgaaccctccaaaccccggcttgaacccatccccgagaaaccgatcaagcccaaagacccgctaccgcagccccccgtggtcgccaaccagcaattgccggacctgccgggcaccgacctgaccccgttacaccaggaaaccctgcatatcagcggcgcactcagtcgcgcgccttcgagcctgggtacacggctggacacattcaaaaccgacaaacccgccacccttggcgagcagaacagaacacccggcgttcatctgcatctgtatccggacaaggacaagtggtacgccccggtcggcgagcgctggttcgaggtcaatctggacgacaacgacaacgtggtcatagccgaccccaacgaccccgcgcgcactggcccgttgctgatcagcaaccggtccggccaatggttcgtcgacgtacggctacgcctgcgcgggggaggctttcgcaatcggcggcgtgccgctcaggggcagaagccgcagcgcatcactgagctgaggaaaagcctcactgacttcgatgccaacgagagtcgtcgccaggcggagctttccgaatccctcgctgccatcggctccgaacctggcccctcgaccgcgcaaaggcgcgatgcctatatcggcgacgtcgaccggcggctggaggaatacgacgtgccaatccgccaactcacggcactgggcgttatcgacacggtgcccaactaccagatcgccatggtcgattatttgaacaaacagttgctgctcacccgctccgccgtcgaggagcgcctgcgcccctatcgagacaccttgctcgatacggtcggcttgctggacgaagcaacctccgagatcccccagagcaccaccgatctggcccaggaaatgtccacgctgaacctggaaatgatcagccgcctggagtacgtcgactcacgcttcaaggaactttcgaagctgggcagcgccggtgcgcaggtgatgcagacaacttccaaggcactgcccaacctcaacctgcacgacctgaaagccttgcaaataatggtgtcgcgcttcctgtgcatcaaaaacggcaacgcgccggaacagcagcaggcacgcacccagctgagcaccatcgtgggtatggccgacctcgctgtgcagagttacctcgataccctgcaaaacgatgccgacagccccttgtcggagcgtatcgaggtgctcgatagcctcgtcgaccaattcaccactgtcgaccagcgcctgcttgacctgcatgccgatgcacccgaacaggtgctcagggaaccgctcaacgacctgttacaactcgtcgacgaattcaaccaacgtgcgactcacgacttggcgcgactgttgcgcgaacgcaaggcattggagcccaagccaggcccctctcggcccgcaccggtggcacctcgcaaggtcatcaagacacgctttcacggcgttgtggtcggcgagccacgcgagtcggacccttccctggtagatgtcaaagcaccgctgaccggcaaggtgatagccaccttccatgaaaaatcgccggggcagtgggcgcagcgggtcgaggagcgtacccgcccgccagcctcgaagccgatcagcttggacaccagcctcaaagagggccaggcgcttctggatgcaatacccgccacaatcaaacgtcttgagggccattccaataaaccctggcgcctgccgacagacatcgaagggatgtttcacctggaggtgtcgccccttgagcgcgcgattgaaaacatcgaggaggccctcacccaacgcaatctgactgaaatcgaccaccccgccgcggcccaactcaagctcaagctcaatgcagccgtgcagcagctttacgaagagggcaaagccacgcgcatcaggatgatcaaggagcaggttcccgtcgcatctcgtattcagtggctgtatgaacagggcgaggtgatcgtcaggaaaaccctcacgcgccgacgcctcaaaagccgtagagacttcctggacgaatacggagtccacgatcgcaagacccaggccgtattgtggtatgcgcactttcattaccactcgatgcaggcaggtagcgaagacttcgtcgccgggcacttcaagaccgttgcgcaacaaaaactcgggggtgcctttcagaccacagggctctcagacaaagagcagattgccattgagcgcgcagccattggcaaaccattggccaagtcgatgtttttcaacacgcacccccacagcgaaacctgagggctcgctcactgccataccctgcgcaagcgctccagcgcctggacaatcgctggctccggtacggcggcgaaccccaataccaggccggcacgctggtccgcaggcgggctggattgcgccagccaataactgctcaggccattgatttcaacctcagcggcccgcgccagttcgagcaactgctgctcgcgggccaggctgtccacgcgcaccgtcagatgcaaccctgcggcgacactgggcaactcgccgacaccggccaacccgcttggccaacccgccagcaaggtattgcgccggctcaacgcggcacggcgcatgcggcggatatggcgctggaaatgcccagcggccatgaattcagccatcaccgcctgggtgctgacctcggagtggcgcatgtcgacggcacggcgccgggcgaacgcatccaccaggcccgccggcaacaccagatagcccaggcgcaacgcagggaaggcgaccttgccgaaagtaccgacatagagcacgcgcccactgcgatccagcgcggccaggggcgacaacggtgcgccgctgtagcggtactcgccgtcgtagtcgtcctcgatgatccaaccgcccgtacgctcggcccaggcgagcaactccaggcgccgcgccaggctcatcaccacccccatcgggtactggtgggagggtgtgacataggccacgcggcaatcgctcaaggtattgagcacctgacaatcaatgccttcgccatccaccggcacgccgtgcaatttcccgcccgccagggcgaacgcatgcccggccgcacgatagccggggttttccaccgccacgccatcaccgggctccaccagcaactgtgcacaaaggctgatggcctgctgcgcgccactggtgatcactatttgttcagccgtgcaatgcatgcctcgtgagctgcgcaagtaggcggcaatcagaccacgcaggcggccgtcgcccgcggggtcgccgtagcacagcagttccaggtccggattgcgccagaatgccccgttcagcttcgcccagacctcgaacggaaacagatcgaaggcgggtacacccacacgaaatgcccgtggcggccccgctggcggcagagacaggtggttggtttttatccgcgccaagcccgcgctgtggataacttcactgtcgaggtcttccggcaaatccgcccattttgtggataaggttggggataagcctgttgaaaaccctgtggatacttttgtggatagtttttttgcgctgggtaattgggccacataggtgccatcgccgacccggctttcaataaacccctccgcatacagctgatcgtaggcgcgcaccacgctgttacgggaaatcgataacgccgccgccaggtcacgggtggccggcaaacgcgtcccactgaccaatcgcccgtccagcacgcgctggcgcagggcgtcatacagctggcgcgtcaggccttgacggcgatccagctcaattccggcagggttgaacgacaggggcggcgagacaggcgacatattggacctatgaaatgggtgccagatggctctttcaacgagccattagcctgcctaggatgcaggcattcgccaaggaatatttccatgtacacacctcgcgcctttgccctcgacgatttgcccgaactgcagcaactgatccagcacacccgcctggcgcaactggtgacctttggcgagcatggcctgcaagccagccacctgcccttgctgctcaaccccgatgaaggcccgaacggcacactctacgggcacctggccaaagccaatgcgcagtggaaagacctgcagaacggcagcgaagcgctggtgatcttcgcgggtgccgaggcctacatcagcccggcgttctacccggccaaggccgagcacggcaaagtcgtgcctacctggaactacatcgccgtgcacgcctatggcaaagccgaggtgttcaacgatgccgagcgcttgctcgcggtggtcactgcgctgaccgatcgccatgaaggcggccgcgaccagccctggaaagtcagcgacgcgccggccgactatatcgacggcatgctcaaggccatcgtcggcttcgccctgccgatcgagcgcttgatcggcaaacgcaaactcagccagaaccgcagtgcggccgacatgacaggcgtgcgtgcgggcctggcaaccagcgccgatgtgcgcgaccagaccctcgcccgttttattccccaaggagccccagaatgagcccgatcgacatccgccaagtcaccgccgccgaccacgctgcctggttgccgctgtggcaggcgtatttgaagttctacgaaaccgaactgccggacgccgtcagccaaagcacctggcaacgcctgatcgacgccagcgagccgacccattcggccctggcctggcaggacggcaaggcggtgggcatggtcaatttcatctaccatcgctccaattggagcatcgagaattcctgctacctgcaggacttgctggtggacccggcccaacgcggcaccggcgtcggtcgcaagctgatcgagttcgtctacgccaccgccaaggccgatggctgcgccaaggtgcactggctgacccacgagaccaatgccaccgcgatccaactctacgaacgcatcgccgaacgccctgggttcatccaatttcgcaaaggtctttaaggagcgcagcatgactacttccctcgccgactggaaaggcgtcccggccccaaccgtcaaactgcttgaagggcgcttcatccgcctggaaaaactcgacccggcccgccatggcgacgaattgttccaggccctccagggccccggtgccgaccccaagctgtgggactacttgccgtacggccctttcccggaacgcagcgccttcaatgactggctgaacaaccacgcggcccacagcgacccgtacttcttctgcgtggtcgaccgccagaccggccaggtgcaaggcctcctcagcctgatgtccatcgtccccgcacagggccgtatcgaaatcggccacgtcaccttcggcgcaccgatgcagcgctcgccgaaaagcaccgaggcggtgtacctgttggccaaacacgcgttcgaccagggctaccgccgcctggagtggaagtgcaacaacgccaacgatcgctccaggtacgcggccgagcggttgggcttcagtttcgaaggggtgttccgccagcacatggtggtgaagggcaagaaccgcgataccgcgtggtactcgatcctcgattcggagtggccgaaggttggagcggggtttgagaagtggttgtcgcaagagaatcagcgcggggatgggcaggtgaaaacattggcgcagtgccgtgcctgaatcgccaacactgcgttgatcaatgtgggagccgggctcccacattgggtcttcagtgccagcgccgttacctagaggtttctgcgcaccttcactacccccatcttcaatccgaatggccggaacactgcattcagcgatttcagtgtctgattgccttcgccatgctcgatatgcaccaaggtacgcacggagattttgcacatcctggcaaactggctttgatgcaggccggtgacttcggtgcgcaagcggcgtaccgcttcggcgatttccagtgtgccttctgccaaggcatcctgaatgctttcaatcaacagggtgcgttcttccacggtcaagctcatttcagtccccattctttcaaccgctgcggcagatgtttcaacgcaatgccgggatggttcattgtcactgcaggcaggccgctggcattgagtatgtctggcagggctgaaagctgttgcgcggcctccctcaggtcttcgaacagctgctcgctgtcgacaagatcacccagcaaatgacatacaccccgccaatccacgtcgcccgcccgctccagctccctgggccatttggtcgtgcgcgtgatgccttcgtcgtccattaccatcggcgccaaatcgtagatgggtgcaagacgcagggcgttcgcttcgcgaatgatcgaggtattgcgaccatggttgtccgagttgccgaggattttgttcaacagatcgcgcttgagatactcagcgaccaaccccggtacttgattggactgaccagcctctcgccacaattcaaccaacaacgtcaccacctcacgatgcgccatggcgctgcctggcaccgtgacacccgccaatgagtagattgactccacggcatagcgttcgaccccctgcgcagtgacgcgccgatcaaaacggtgcatccacacactgggcttgctcgcttcctccagtgataaccccgactccgccacggtatcaatacccaaggcctgcaaggctttgtagtagtggaattcgctacgcaggatgtcctgatccgtctgtgtgcctttgttgcgtgcaaacttcacaaaccaatgctgcttgacctgctcgtcgtccagcaccgcatccgggaataacaaaccgtccaggttttctgtcagcagtaactttggcgcctccccgcccgcccccgtggctccgccgatagctgcgccttgctcataggcatactccaggaaacggttatcccgccggataacctcatgacgttcaaaccccatgggggttcgattgtccaaagcctcaaccgattctttgattcgcatatgtccaatgggggcaggcgtactgcgcatcagcagaaaaaggtctgcactgatgtcatctggtttatccccaccaatacgcgccatcagaaaacgtttagcggcacccgcaggtgcgatgtcatgtacaaaagcgggagcatgctgggctctatcaccctcccattgcagtgggaacgcggcactcaccgaagtggcgaagggtgtcgccagttcatcaaggtgttccaccagatagcgctggtcataaccaaaactgcaccgactttcgaaacccagttgcggcgtatcaaatgtcaggagcatggcgtcctgccactttccttcagcgtagatttgtagtgtcagacagaccatggctctcacctgcaatttaatgcattcaccagctgaaaaggtgaactgaaattgcaatatagtgcagatacggagctcacgcacccactatgaacgcaataaaatgcagattcaaaaaacatcgagcaaaggaagatgagtttttaatcgccccgtactagagacaactcccgcaaaccaggggtcgatggcctgacagttatcaccccaccatctcgctaaattcccggcctcattcatcagaggttgggatttcatgccttttacaccgcacagagttgcccttgtcattgcccttgctctcagcgccgccagccttcaaaccgcacaggcgcggggcgatatcgaatacacgccgtactggtatcaaccctacgatgcacttgatgacgcgtgggtctacgtgcccgaaaccaaagcggcgcccctcgacggttatctcacccgcaaggccacttcgcacaatggcttgcaagtggccaaggtgctggagcccgcgctgattcgtttgctgcagtccggggagctgactgccgagcagatcaaagccctggagaaattcggtgatgcgctggagaaacagcctggcggaatcggtgccagccttgagcaattggctggcagccagaacgccaacctcgcgggcgcaacgcaaaacaccacgcagcaactcggcaaccaattgatttcaaccctgcgcacactgcccgccgacgacgaaggacacttctgggttcaaggcctgggccacgacggccgcctcgataaacaaggcggcagcgccggcttgaaatacagcaccgaaggcctgctgttgggcgccgactgggcactggatcacgcctggcgcgtaggtgtactgggcgcaaaatccaccagccatttcgacactccacgcttcgcctccgagttggacagttggcacctgggcggttatgccgtacgccgggacggcccgctggccctgcgcctgggcgcgatatacagcgaccatgcggggcagaacaaacgcaacgtcaacctgctggattacaaggagcacctcaggggccaatacaacgcccagagccaaaccctgttttccgagctgggctatcaactgggcagcacggatctcagcgtggaacccttcgccggcctcggcttccagcgctaccaccgcgacagcttcaaggaaaccggtggcctgaccgcactgaacgtagatgcacaaacccagcagaacttgagcagcatcgtgggccttcgcctggcaacggtgtatcgattcgataaccaggtcagcctcacacctcatctcagcaccggctggaaacacctctacggcgaggtcgaaagccaggtgcgccagtcctaccgcgcattgccagggcgggttgacggcttcacggtccagggcacttcgctggatcgcaatagcctggatctgcaagccgggctggacctggccctgtcgacacaacacaccgtcggcctgacctacagcgcccaggccggtaccaacagccgtaaccacggcctgatggggcaatggaagatgagcttctgacccaccaaactccaggcaaaaaaaaggggggcacctgcccccccgaggattaaacggtcgtgtcgaaggctgtatcagccttcgatctcaatcaggatttcgccagggttgacccggtcgcccttggccacatgaacggcggtgaccttgccggcaatcgcggcctgtacttcggtttccatcttcatggcttcggtaatcagcacggcctggccggccttgaccacgtcgccttccttgaccagcacatcgacgatattgcccggcatcgctgtgctgacatggcccggcgcggtagcgtgcttgcggttgctgctgccgccgctgacgaactcattgagcggttcgaacaccacttcttccggcatgccgtcgatggacaggtagaagtgacgcttgccctcggccttcacgccaacaccggtgatgtccacgcggtagctttcaccgtgcacgtcgatgacgaactcggtcggcacgccttcgccaccggcacgcgccacaccgccggcttcagggatcggcagcagcacttccggcgccagggtgccggcgtcgcgttcttcgaggaacttgcgcccgatgtccgggaacatcgcgtaggtcagcacgtcttcttcggacttggccaacgcgccgatttcaccgcgcagcttggtcatttccggcttgagcaggtcggccgggcgcacgtcgatcacttcttcgctgccgatggcctggcgccgcagtttctcgttcaccgtgcccggcgccttgccgtagccgccttgcaggtagagcttcacttcgttggtgatggtcttgtaacgctcgccggccagcacgttgaagaacgcctgggtgccgacgatctgcgaggtcggggtgaccagcggcgggaagccaaggtcttcacgtacgcgcgggatctcggccaacacttcgctcatgcggttgagggcgccctgctctttcaactggttggccaggttggaaatcatcccgcccggcacctggttgacttgcacacgggtgtcgaccgcggtgaattcgctttcgaactggtggtacttcttgcgcacggcatagaagtacaggccgatctcttgcagcagctccaggctcaggccggtgtcgaactcgctgcctttaagggcggcgaccatcgactcggtccctgggtggctggtgccccaggcgaagctggagatggcggtgtcgatatggtcagcaccgttctcgatggccttgagttggcacatcgcggccaaacctgcagtgtcatgcgagtggataaagatcggcagactctgctcggccttcagcgccttgaccagctcgccggtggcatacggggtcaacaggccggccatgtccttgatcgcgatggagtcgcaacccatcgattccagctgcttggcctgcgccacgaaggcttcaacggtgtgcaccgggctggtggtgtaggcgatggtgccttgggcatgcttgccggcggctttcaccgcttcgatggccacgcgcaggttacgcacgtcgttcatggcgtcgaaaatgcggaagacatcgatgccattcacagccgccttggccacgaacgccttcaccacatcgtcactgtagtgacggtagcccagcaggttctggccgcgcagcagcatttgcaggcgcgtgttgggcaatgcggcgcgcagtttgcgcaggcgctcccacgggtcttccttgaggaagcgtacgcaggcgtcgaaggtcgcgccgccccagacttccagggaccagtagccgactttgtcgagcttgtcgcagatcggcagcatgtcgtcggtgcgcatgcgggtcgccagcaacgattggtgggcgtcgcgcaggatggtgtcggtgacaaagattttcttggacattgttgtattcctcacaggcctgcgtgggcggcgatggcggcggcgatggccagggccagctcttcgggtttgcgcttgatcgagtagttggtcagctcagggtggctttccacgaagctggtgttgaactggccgctgcggaattccgggttgcgcaggatttcctggtagtaggcggcagtggtcttcacgccttgcaggcgcatgtcatccagggcgcgcaggccgcggtccatggcttcttcccaggtcaacgcccacaccaccagtttcaggcacatagagtcgtagaacggcgggatggtgtagccggtgtagatcgccgtgtccgtacgcacgccgggaccgccgggtgcgtagtaacgggtgatcttgccgaagctgggcaggaagttgtttttcgggtcttcggcgttgatacggaactgcaacgcgaaaccacggtgctggatgtcttcctgcttcaccgacagtggcaggccggaggcgatgcggatctgttcgcggacgatgtcgatcccggtgatttcttcggtgatggtgtgttccacctgcacccgggtattcatctccatgaagtacacctcgccctcggcgagcaggaactccacggtaccggcgttctcgtagcccacggccttggcggcgcgcaccgacaggtcgccgatataggcacgctgttccggagtcagttgcgggcttggagcgatttcgatgagcttctggttgcgacgctggatcgagcaatcgcgctcgaacaggtgcaccacgttgccgaagctgtcaccgaggatctgcgcctcaatgtgcttgggattgacgatgcatttttccaggaacacttccgccgagccgaaggccttggtggcctcggaaatcacgcgggggaaggcttgttcgagttcttcgcggctgttgcaacgacggataccacgaccaccaccaccggacgtggccttgagcatcaccgggtaaccaatgcggtcgccctcggtgagtgcctcgtggatatccgcgacgttgccttcggtgcccggcgtgaccggcacaccggccttgatcatgctgcggcgcgcttcggtcttgtcgcccatgcggcgaatcacttcggccgatgggccaatgaatttgatgccgcgttcggcgcagatgtccgccagttcagcgttttccgacaggaagccatagccggggtgcagcgcatcgcagccggtttccaccgctaggttcaccagcttgcgcgggttcaggtaaccggccaggggctcggcaccgatgctgtgggcttcgtcggcacgcttgacgtgcaacgcgtggcggtcggcgtcggagtagaccgcgaccgagcgaatgcccatctcggcgcaggcacgcacgattcgtacggcaatttcaccacggttggcgatcaggatcttttttatcacttggaaattcccttgagccgattgctgcgttcttcgacccactggagccgggtcggcgcgtgaccaaatgtttcatgacagtcgcgagacacacactaagcccgccaagggattaacaaaaatcaataattattgggtcgggcataagtaaagacttatagttgtccgaacagccggtggcgagagaattagaaaatgcgtaagtcattgatgcgactgacattgcgtcaattgcagatcttccatgaggtgtgcgatttgcgctcctacagccgtgcggccgaggaaatgtccctcacgcaaccagccgtcagcctgcaaatccgtcaactggaagagctgatcggccagccgctgttcgattacgtgggcaaaaagctctacatgaccgaggctgccgaagccctgcagcgcgccagtcgcgacatcttcgggcgcctggaaaacctcgatatgcagctttcggacatgcagggttcgttgcagggccagctgaaactggcgattgaatccagcgccaagtacttcgtgccgcacctgttcgccgccttcaagcgtcagcatccggaagtgcagttgcaattgacggtggtgaaccgcgcccaggtgattcgccggctttcggacaaccgcgacgacctggtgatcatgtccatggtgccccaggacatgggcctggaattcctgcccttcctcaacaacccgattgtcgctgtggcgcctcccgaccatcccttgagcctgcaaggcccgctgcgcctgcaggacctggagccctacacgctgttgctgcgcgaaccaggttccggcacgcgactggcctgcgaggagtacttcaaggaaaaacgcgtgcacttcacccagacggtggaagtggcctcggccgaggcgcagcgtgagtgtgtctgtgcgggattgggcgtagccctgctgacgcgtcatgcggtcaacatggagttggccaccggcgggctcaaggagctgccggtggaagagctgccgctgtaccgcagttggtgcctggtgcaggccaaggccaagcgcctgtcaccggtggcccatgcgttcctgggctttatccgcagcgaacgagcgcagatcagcgtgctggctgagcgtttcgctgggcagccgcgggtgcctgccagtggagttccgggtagtcactgatgctctggagcaactggcgctcctcacaacggtcttcgattgcgcgacggaacgccatgcggcgttggtcttcctgctgacgacgggttttgacggagctgttgctgtcttcgtaagtccgggccatttggagtctcccaatgcgagtacggggagttcaggatggccttggggagttacggtttggcggcacacgcatgacaagacgatgaacattcctgatctgtaggaaatccaaatgtgggagggggcttgcccccgatagcagtgggtcagccaatgcatttggtgactgatacaccgtaatcgggggcaagccccctcccacattttgacctcaggtcaatcgtcgagggctttgacggatttcggtgacaggcgaaggctgcgcagactgcgcttcacgctcttgaggtggttgaccaggctcggcccacgcgccatggccacgcccatcgccagcacgtcgatcaccaccaggtgggcgatgcgcgaagtcagcggcgtgtagatttcggtgtcttcgtgcacgtcgatcgccaggttgaccgtagacagttccgccaacggcgtctggcttgggcacagggtgatcagcgatgcaccactttcacgcaccaggttggcggtgatcagcaggtctttggagcggcccgactgggaaatgcagatggccacgtccgtaggcttcaaggtcaccgccgacatggcttgcatgtgcgggtcgctgtaggccgcggcggtgagcagcaaacggaagaatttgtgctgggcatcagctgccaccgcgcccgaagcaccaaagccatagaactccacgcgctgagcctgggacatggccgtcacggccttttgcaactccaccgggtcgagcttctcgcgcacttccatgagggtgtgcaaggtggtgtcgaagattttcaggctgtagtcggcgacagagtcgtcttcatggatcgcaaattggccgaagctggcgccagcggccaggctttgcgccagcttgagtttcaagtcctggaacccggagcaaccaatagcgcggcagaagcgcacgatggtcggttcgctgatgcccacgctatgggccaggtcggccatggaactgtgcatcacagccgcagggtcaagcagcacgtgatcggcaaccttgagctccgatttgcgtaacaggtggcgcgactgggcgatatgttgcaacaggttcaaagggcaggactcttgttatgggcagggccagggatgtagcaagcttgtagttatactacaagaattgccgttttgcccgtccgacgcatcactaaatcgccctgcccccctttgaatctaagggcagccgcgttgtagccacaggggcgtccccagcgtcgttaaggaaattctgcatttttccgtaacaaatctgccaacccatcagcctgcatcggccgactgatcaaatagccctgcacttcgtcacaacgctcgccccgcaggaaatccagctgctgctgatcttccacaccctccgccaccaccttcagcgccagcccgtgggccatggcgatgattgcccgagtgatggccgcgtcttcgcgcccctgacccaggccgcggatgaaggtctggtcgatcttcacgtagtccacgggaatgcgcttgaggtagctgagggacgaataaccggtgccgaaatcgtcaatcgccagcttcacccccaggtctcgcagttgctggaaggtcgcgatgatgtgttcgacgctgtcgagcaattggctttcggtcagctccagctccaggtattgcgggtccaggccggtttcttcgagcacctggcgtaccaggctgaccaacttgccctggcgcagttggtgtaccgagaggttcaccgatacccggatcggcgccaacccctggcgctgccactcgcaggcttgccagcaggcctcgcgcagcacgaattcacccagcggcacgatcaggccggtctcttcggccaggccgatgaaatcccccggcggcaccatgccccactgcgggtgctcccaacggatcagcgcctcggccgcattcagcttgccgctggccaggcacagcttcggttggtagaacaccgtgagctgacgctcttcgatggccttgcgcaggtggttttccagctgcaagcgctccagggtgctggcttgcaggctgtcggtgtaaaactggaagttattgccgcccaagtgtttggcgtgctgcatggccatgttcgattggctgaccaacgcggaaatttcccgcgcgttgtccggcaacaggctgacgcccatggaggcactcaccaccaactcgtgcccctccaccgtcaccggcacccgcagtttggccagcagccgcgtagcgacccgcgccaggctcgacaggttgccgtaggcgtcgaacaacacagcaaactcatcccccgacagccgtgcaatggtgtcggcctcgggcaaggcgttgattaagcgtcgcgccattttctgcaacaactggtcggcgacttcatggcccaggctgtcgttgagcagtttgaagcggtccaggttgatgtgcagcaacgccaggctgcgcccaccctggcgtacgcgctggtgagcttcgcgcaaccgttcgcggaacagcgagcggttggccaggccggtcagttcgtcgtagtgagtgaggtagcgcatacgctcttcggactcacgccgtgctgaaagatcggcgaagaagcccacgatatggctgacttttcctcgaatatcacgcacgacattcaattgcagccactgcggatacagctcgccgtttttgcgtgtctccaccaattcgccctgccacgtgccgtggctgagcaacgcctggcggatcaccgggaaatggcggcgggcgtcacggctgctgggcagttccaccacgttgcggccaatcatgtcgtcggtttcaaaccccgtgacacggctgaaggcttggttgacggcaatcagcttgtagtccggatcaaggatcacaatgccttcgctggcggcttcaaatacggtcgaggccaaccgctgctgttcctccagggccttgccggcgctgatatcgcggcgcgtccccagcatgcgcgtgacccggccgctgggcgcacgctccacggcgcggccacggtcttcgatccacacccagtgcccgtcgccatggcgcacgcggtattccacctggtagtcctcgctgcggcccttgaggtgttccaccagggcacgcttgagcagcggcaggtcttcggggtgcaggcgcggcttgaggtggctgagcattgccgttacgtactccggctccaggccgaacagctccttgagctgggtgtgatggacctcgtcggtttgcaggttccagtcccacaggcccagttcactggcttgcagggccatggccaggcgcgcttcgcttttattcagggccaggctggcggcgtccagttcctggctgcgctgtgccacacggtcttgcaggccggtctgggcttcgcgcagttcctgttcgacttggcgacgctgctcgacttcgcgcaccagttcctgattgagttgctcgctgcgctgctgcgcctgttgcaggtgctcgatcagcgcctggttctggaagcggcgcaacaacccgcgctgaatcaggcgattgacctgccacgccaccaggctcaaggacgccagcaggatcaggccaagtacaccccagccgcgctgctgcgggtcgccactccagaacaggtagaggatggacggcaccaggcacggcaaggcaaaggacaggaacgccggcaggctcacggcgtatgccacgctggccgacaaggtcgccgcgccgatcaggccgaacacccaggcctgttgcatgaagctgtccaccggcaccagggcgatggcggcggtggccagcgtcaggccgctgaccgccgagccgagcaggaacatgcgttgccacaccggttgggcctggcggctgggcatcgccgagtcaaacgcggccacctgaatcacacgcatcgccaccagggccagcagccagaccaaccagacgctgtccaacaggtattgctgggggttccacagtagccaggcgcagaccaggccattgaccaacatcaacagggtcggcagcagcgagccttgatacagcaggcgtgtgcgctcgaccgccatctccgtggcgtagtgtttacggataacctgcgcgggagccgccgaggggccaagcaggtcggtgctaagggtcataggcagtgttcttataatggtgagcccgaaacgtcgacggagcatacacaagcaagcgcttgggccaaactgctccatgtcataaaaccgcacgctcatgccgcgcaaacttccgggccagacggcttgagtgagacgcggcgcgggctgtggccattgaccgaccggtcatcaccccgcaggtttgcctcgaccacccggcattgttatttgccccactcccccgggggccatagaatacgccgatgcgcgatgatctctcccttttgctgaactccctcaacgatgcccaacgccaggccgtagcggcccccgttggccgtcagttggtcctggccggtgctggctccggtaaaacccgagtgctggtgcaccgtatcgcctggttgatccaggtcgaaaacgcgtccccgcattccatcctgtcggtgaccttcaccaacaaggccgctgccgagatgcgccaccgcatcgaacagctgatgggcatcagcccggccggcatgtgggtaggcactttccacggcctggcgcaccgcttgctgcgggcgcattggcaggaagcgggcctggcccagaccttccagatcctcgacagcgatgaccagcaacgcctggtcaagcgggtgatccgcgagctgggcctcgacgaacaacgctggcccgcacgccaggcgcaatggtttatcaacggccagaaagacgaaggcctgcgcccgcaacatatccaggccagcggcgatctgttcctggccaccatgcgcagcatctatgaggcctacgaggccgcctgcgtgcgcgccggggtcatcgacttctccgaactgctgctgcgcgccctcgacctgtggcgcgataacccaggcttgctggcgcattaccagaaacgtttccgccacatcctggtggacgagttccaggacaccaacgccgtgcagtacgcctggctgcgcctgctggccaaaggtggcgacagcctgatggtggtgggcgacgacgaccagtcgatctacggctggcgtggcgcgaaaatcgagaacatctaccagtattccgaagacttcccggacgcggtcaccatccgcctggagcagaactatcgctccactgccgggatcctcaaggcggccaacgccttgattgccaacaacaccgggcgcctgggcaaagaactgtggaccgacggcggcgaaggcgaagcgatcaacctgtacgccgcgttcaacgaacacgatgaagcgcgctacgtggtggaaaccatcgaaagtgcgctgaaaaccggcctggcgcgcagcgacatcgcgatcctgtaccgctccaacgcccaatcgcgggtcctggaagaagccttgctgcgcgaacgtatcccgtaccgcatctatggcggccagcgcttcttcgagcgggccgagatcaagaacgccatggcttacctgcgcttgctggaaggccgtggcaacgatgcggcgctggaacgggtgatcaatatcccggcccgtggcatcggcgaaaaaaccgtcgaagccattcgtgaccacgcacgccacgccgatgtgtcgatgtgggaagccatgcgcctgctcatcgccaataaaggcctgaccggtcgtgcggcgggtgcgctgggtgtgtttgtcgagctgatcgagaacctggcggccaagtgcgcggaaatgcccctgcatttgatgacccagaccgtcatcgagcagtccgggctgatcgcctaccacgaagcggaaaaaggcgagaaaggccaggcccgggtagaaaaccttgaggaactggtcagcgccgcccgtgcgttcgaaaacaccgaggaagacgaagagctgaccccgctggccgcattcctcggccacgcgtcgctggaagccggtgatacccaggccgacgagcatgaagacagcgtccagctgatgaccttgcacagcgccaagggcctcgaattcccgtatgtgttcctggtgggcatggaagaaggcctgttcccgcacaagatgagcctggaagagcccggccgccttgaggaagaacgtcgcctggcctacgtgggcatcacccgggcgatgcagaacctggtgatgacctacgccgagacccgacgcctgtacggcagcgagacctacaacaaggtgtcgcgcttcgtacgtgaagtaccgaaggggctgatccaggaagtgcgcctgtccaacagcgtcagccgcccgttcggtggtggacagcagcagaactccagcagcatgttcgccggctccgagattccggaaacccagttcagccttggccaacaggtcaggcattcggtattcggcgaaggggtgatcctcaatttcgaaggcgcgggtgcccaggcgcgcgtgcaggtgaatttcgccgaaggcagcaagtggctgatgatgggttacgcgaagctcgaagccatttgaaacatttgcccacatgaaggtttttggcccgcccttgtttttaacgagcgcgggccaatatctgtaataagtcctacagaccactctgaatcggtcctacgcaaaagcccgaaacattatgccgctagccactgtcaccacacctgtgcaacatggcgcgcgtgcaatccacaaatgggaattccctttatgaaacgttttcttagcatcgccatggcgttgtgcatcggcctgacgatgagcctcgacgccaacgccaaacgcttcggtggcggcaaaagctcaggcgcagcaccgactcaccagactagccaaatggctccatccgccggtgccggcggtgctgcggccaccgcaggcgccgccggtgctgcaggcgctgcagccaaggccggcggtgcttcgcgctggttgggccctcttgccggcatcgccgccggtggcctgctcgcctccatgttcatgggcggcggcttccagggcatgcagatcttcgacatcctgatcatggcggtcatcgccttcctggtcttccgctttatcgccgcccgtcgccgcaagcagcaggagcacatggctccagccggcgcgccgatgcagcgtgaagtgttcgagcaaaaaccagccatgggctcgatcttcggtggttcgccagcgccagctgcggcccgtccggtgatcaacgcaccggcctggttcaacgaagaacgtttcgtcgaagcggcccgcagccacttccagtccctgcaacagcactgggacgccaacgaaatggacaagatcgccgagttcgtgaccccgcaactgctggagttcctcaagcgcgaacgcgccgagattggcgatgcattccagtcgacttacatcgacgacctgcgcgtgcaactggacggtgtggatgatcgcgccgacaagaccatcgccaccctgaccttcagcggtgtgtcgaagtcctcgcgtttcgaccagggcgaagtgttcagcgaaagctggaacatggaacgtgcccagggcgataaccagccatggctggtcgccggtatccgccagaacggctgatccctgcacgcttggtaaacagatacaaaaaaccccggacctgtccggggttttctatttcacggttgcacttatagcgagctactgtataaaacgcccctataaaccgcgccatctagcaagaggatcccggccgtggaagaaatcatcgaacaattgcgtgaagccaacgaaccggtcccggttcccttggagctgcctgacgaagaccaactggtggagatcgaggaacaactgttcatcgacatcccgtttgtcttccgtgaattcctgctgaccgtcagcgacgtggtgtacggcagcctcgagccggtgaccgtcaccgacccgcagtcccacacctacctgccggacgtggccgccaacgcctgggacgccggtgtcgaccgcagcctgatcccgatctgccaggacggcgacgactactactgcgtcgaagaagacggcaccgtggtgctgtggtccggcgaagaagaaatcgtcaccgaagaaacctgggaatcggtgtggcactgggcgcgagacgtctggctggaaagctgacagcgctctctggctaaagaggcttgctgtggcgagcgggcttgccccgcgtcgggctgcgaagcagcccccccaaaaaagtccctcaatgctccggcgtatccttatggttatccagcgtctccaacaaggcgacctgcatccgcgtatgcacgcggatgaaccatcgccagagcaccgccgccacagccgccgtgaccacggcgatcagcaccagcaacttgttggtcggcagaatactggccgacaaggctgccaatagcaggaagatcaccagcagcgagaggatcgggatcagctccgcgatcacccttcgcacacgctgggtatgccgcccggccatttccggcttcacgctcatctccgccagcagcatcgacagcgccttgagcttgcggtatgccgcaatcaagaacggcagcgacaacagcaacgccccgccccagatcaacgccttctgccagctcggatcgctgatccagccttccagatacccaccgatgcgcgccgcgaaaaagccgccggcaaagaagatcgcaatcaccagtgccaggttaacgcccacttgcaggatgatcttgcggatcatcgacgccagcatcgccccctcgccctggggttgaatgctgcgcagccattcgccatacatgccgaatactcggctcatacgctggggcatgaccgacgcgatcttcaacgacagcgggtcggcaccgcgaatcaggtacggcgtgagcagtgtggtgatggccgaaaccgctaccgccaccgggtagaggaaatcactggtcacctgcagcgtcatccccagcgccgcgatgatgaacgaaaactcgccaatctgtgacagccccatgcccacgcgcagtgaggtgcggccgtcattgccggcgataaacgcccccaggccgcaggacagcatcttgcccagcaccacggccacggtgatcaccgcaatcggccaggcgtattgcagtaggatctgcgggtcgatcatcaagccgatggcgacaaagaagatagcactgaacatgtcgcgaactggctcgatcaggcgctcgatcttaatcaactgccgagattcggccatgattgcgccgatcaggaacgcgcccagcaccatgctgtattccagtttgaccaccagcaggcagaaaccgaaacacaaccccagtacggtgatcagcaacatctcgttgctttcgaatttggccacgtaggccagcaaacgcggtaccagcaaaatgccgatgaccagcgcgacaatcatgaacagcgagagcttgccgactgtggagaacacttcgccggagctgaccgtaccgctgacggcaatgctcgacagcaaggcgatgatgccaatgccgaggatgtcctcgacgatcagcacgccaaaaatcagttgagcgaaacgctggttcttcatcttcaggtcattgagcgccttgacgatgatggtggtcgaggaaatcgccaggatcgcgccgaggaacagtgaatccatggtattccagtcgaaccagcggccgatttcgtagccgatccagatcatcaggatgatttccaggaaggccgcgataaacgcggtggcgccgaccttgaacagtttgcgcaggctgaattccaggcccaggcagaacatcaggaagatcacccccagctccgcgagggtcttgatagtgtcttcgtcgtggatcagaccgaacggcggggtgtgggggccgatgatgaacccggcgacgatgtagcccagcaccaccggctgcttgaggcggtgaaacaggatggtgacaacccctgccaccagcatgatcacggccaagtcctggataaagctgatggcgtgcatggcgaggggctccttgagggtactggcgcttttcccacttccgcgcgcgcctttgaaatgtcgcaaagtgcggaaggaaaagtctgccttgatcgtaagaaatgccctgagatgggcttttgaaggttaacaccgcgacttccgccggaaagccggtgcaatatatggaaacagatcggtgcgcgcgtgacggcaagccccccaccggcgtcccgttatggatggttctgcaaagattccagcacccgcagaggtgccccccaaccaatgcctacaacccgtgagtgtgctatggaacccggaaacgcccagctgtcgatgacggtattgatgacccctgacatggccaacttctcaggcaatgtccacggcggcaccctgctcaagtacctcgacgaagtggcctacgcctgcgcgagccgttatgccggccgctatgtggtcacgctgtcggtggaccaggtgatcttccgcgagccgatccatgtcggcgagctagtgaccttcctcgcgtccgtcaactacaccggcaacacctcgatggaggtgggcatcaaggtggtgaccgagaatatccgcgaacgctcggtgcgccataccaacagctgcttcttcaccatggtggccgtggacgaccagcgtaaaccggccgccgtgcccccgctgcaaccacagaacagcgaagacaagcgccggttcgtgcaggcccagcagcgccggcagatccgtcaggaactggaaaagcgctaccaggaaatcaaggcagacgcgctgtaggccctttccccgttgtaggagcgaacaaccgcgctcctacaatcgccagcactgatcatcgtgggcacagacatcaaagcgctggtccaactggctcatgcgctccatatgatggttcacgatgtccaccatcaccgctttgctggtgtttttgtagtactgcgccatcaacttgtcgttcgccttgacgcgctcgaccacggcggcgtccgtcgggttctgccattgctccaggatggcatcttcggtgccgctcaggcgcatgcggtaaacccgctcataaagcgccagggtacgcgccttgcggccggccatttcctgattcaccagtgcatagttctgacggtactgaacccaatagtcgtcaggtggcgtgaatgagccgaatcgcgccttgcgctcggcgattgactcttcgacggcttgcggacgctgcgcggtgtcaggctccatcaacgtgatgagttgcatatgggtttcaacgatcgcgttgatcaacgcggtacggtgtggcgtatccgggatcaccttgccgaatatcgggcttttgcccgcgcacgatggcatgccgttctcgaatatcggctgtggaatgcgtacatccttgccacccgagcgcgtcaggcgctgcaacgaggtcgtgcagatgccacgcgccatatcgaaggtcacttcgtactcttccccggcctttggcgtgatgctcattgatttgccgcagacatagctgccgccattggtgttgatcatcaacatggtttctttgccgggtgccagcttgaactccagcaagcctctggccgtggccggcgggggcaccgacatgccgacacgccgccgggtatcgaccaggaaaatattgttgagcatgccggtggtctggcccatgcaatgctgcgtatcgtagacgtcgatggtggtattggaggtattggagatgaagcgcagcttggcagcgtccggatcggtggcgtcagggtaagtaccgttcacactgcaaccggccagcaacgatgtcagcaccagggcggtcagtgcccgtggcgaagggaatacgggggacatggttcttccttgaaaagcacaggggactaagaggcgcccgatagtaccggacgccctttgcctggctcaatcaggaatattcctacaacccgataggcgtggcttcgaaacgcacgcgaggatgggcaatgcggtcctgggcgcgcaccagctccagttcgtaactggcgcaggcctgggtttccaacagcacttcatggaccgctgcggcggtgaattcgaaggcggcgagcaggctgtcgcccaacagaacacgcgccagaaacagccccgaggtcaaatcgccgacgcccaccggctgacgggggaacgccagcagcggccggcgcaaatgccagctaccatcggcggtcaccagtagcatctcgaaaccgtccggcaacttgcctggataatccaggtgtttgaccaatacggccttcggcccacgcgccagcaacgccttggccatggccaggcaatcgaacagcgattgcggcttgcgcccggcaaagctgtccaactccaactggttggggcacaggaagtcggccatggccgcggcttcgtccagcaggaaatcgctgacttcctggggcacgatgcagcccttttcaggatgccccatcaccgggtcgcacaggtacagggccttggggttgatggccttgatgcgcgcaacgccggtcagaatcgcccggccctgatcggcactgcccaggtagccggacagaatcgcatcgcaattgcccagctcgccgatggcggcaatgccttccaccaacgcgggaatctgctgtggcgccaacacttctcccgcccattggccatactgggtgtggttggagaactgcaccgtgttcagcggccacacgttcacccccacgcgctgcatggggaacacggcggcgctgtttccggcgtggccaaagaccacatgagactggatcgcaagcagatgaggtgtgcgtttcatgcgggagatttccgtaaaaccaatgaaattctggccgcgcagtatgcgactaaacgcagcctgtacgacagaccggcgacacagttaagctgctctcactttgttggagtttttcgcatgctgaccctgggaaacatgttcgtgttgatgctgctggcgaccggtgccgcctgggtatggcacaaccacggcctgcgcgagcgggcgctggagcgggtcaagcagcattgcgccaagctcgacatcgaactgctcgacggtgcggtggcactcaagcgcatcggctttgtaaaggatgccaacggtcggcgacgcctggcgcgcatctacaacttcgagttcaccgtgaccggcgaaacccgccacccggggactatcacccagttcggtgcccacagcgcacagatcgaactggcgccctacccgttcgagatcaagacgccgctgcccagcgccgaagtgattgagctgagccagtggcgccaggaccatgcgtccaagaaccgtcactgacgactggcggccagcgcacgctgtaacacatccacgtcctgtggctcgctgaagatcaattcgatacgcgaatcgcggcgccattcgctgggttgccagctgagcgggccgttatccacagcgttggcggacacccagccttcggcactgtggataaccagcttggcgcggcgccaatcaaggcttgtaagccagttatgcagctgctgggtgtcgaactgctggctggggtgccagcgccagccaatgctccaaccgccctcttgagcctgactcaggcaaatgggttggtcaggatcggtccagatagccggcatttgccccaggcctgtgggcacggcgaagttatccacagccgcaacagcccgtgcgtcaaggccgggtaaatgcgctagcggtagatgcgcctggcgagtccagtaaagcgggcattctggtaactgccgctcgatcacctcgcgctgcgctgcattcagtgcttcgtctttgttcaataccagcaacccggcactcgccaacgcttcctgctgcgctgggggcaagggtttgcccgccgccagcgcttgcgcatccagcaccagcacgcacggctggacggccagcacgttgtgccacggcgcttcgcgcaactgcttgagcaactgcgccggatgacccaggcccgagggttcgataaacaaccgatcaggcttggccttacccaacaagcgacccaagcctacttggaacggagcgccattcacacaacacaggcaacctcccgcaacttcgcccaaggcaatgccgtcgtcatcttgcgtgagcaaggcagcgtccaggccgatctgcccgaactcgttgatcaacacagcccaacgctcattggctgggcgttgggcgagcaggtgctggatgaggctggtcttgccggcgcccaagggcccggcaatcacgtgggtgggaatgttctgcagcatgagaggcatcgttcggaccgtgtagagcgtttgatcctacgcggttatgcgagccaatccagtgtcaggatcaagcggcgctcgtcggccttcagtgcgggcgaacggtgaatcaggccatggccttcattgccatgccatttggtgcccttgagcaaggccacttcgccgcagtggatctgctcgatacgctcggtgggttcggcatccggctggctgagtttgcgacggtccatcacgccttcacgcaaccactggctgccaaccccggcataggtggtgatcaggcgcaccggcacgtggtcgacgtgaaaacgcgggcacatggctttatccaacagacgcaggcgcacgccgatccgcttggcgccgagcaggcaggcgaacgcactgaccagccacgacacatcggcgataaagccttcgtagccctcaagatcacgacaactggacgccaaaccctgcaagttgggctcggcatcttcattgttgagctcgatgaccatggagtcggccaacggctcgttgagcgacaccaacaacgcgccgaactcggcgatgtgcagcggcaactgacgctgccacagcgccaggttgacgccgtcttcgaggatgtcggacagcgccagcggggtgtcaccacgggtctggcgaatcacgggacgcagggggataaccggggccagcatcaggcggctgcctcctcataccaggggccaaaagggtcggccagcaggcgccagccttcgacgcccagggccatttcttcatcggtgagcaagcacgcatccaactcggcgcgcattcgggtgaagtcgatgttctggccgataaacaccagctcctggcggcagtcgccagtgctcagttgccagttgcccatgatcgccgcgatgctctcttcgtcctgaggccattggcttttgggcacaaagcgccaccagcggccggcaaacccatgacgcatcagaccgccggcctgggaccaactgcccgcatcctggtgtttgctggccagccagaaaaaccccttggagcgcagcagtttgccgttgacccaggggcggtcgataaagtcgaaaaagcgctgcggatgaaacgggcggcgcgcgcggtaagcggtggaggcgatgccgtattcctcggtttccggcacatgttcaccgcgcaattcctgcagccagcccggcgcctgggcggcgcgctcgaagtcgaaacggccggtgttgaggatcttgttcagcggcacttcgcccatgaccatcgggatgatttccgcctgggcgttgaggcgctcgaggattgccatcaactcttcacgttcgcggctgctgatcaggtcgatcttgctgataaggatcacgtcggcgaattcgatctgctcgatcagcaggtcggtgatggagcgctcgtcttcttcaccgagggtttcaccgcgcgaggccaggctttcggcggcctggtagtcgagcaggaagttcatgccgtcgaccacggtgaccatggtgtccagacgggcgatgtcggccaggctttgctcgttctcgtcacgaaaggtgaaggtctcggccaccggcaagggctcggagatgccggtggattcgatcagcaggtaatcgaagcgaccttccttggcgagttttccgacttcttccagcaagtcttcacgcaaggtgcagcagatgcagccgttgctcatctccaccagtttttcttcggcacggttgagggtgacgtcgcgctggacttcgctgccatcgatgttgatttcgctcatatcgttgacgatcaccgccacccgcagattttcgcggttgcgcaggacatagttaagcagcgtgcttttaccggcgccgagaaagccggacaacacagtaacggggaggcgattgggcatcaggtattcctcatcagggttggccggtcaaatcgcccgtttatggcgttcgcgcagctcttcacgttctttggcttcgatacacagggtggcggtaggacgcagcaacaagcgcttcaggccgatgggctcgccagtctcgcggcaccagccgtactcgccgcgcgccagcaattcgagggcgtcgtcgatcttgtccagcagcttcttttcccgctccagcaggcgcagttgccattgacgctgttcttcagcgctaccgacatcggccgggtcgctgttggtttcctgctcgcgcagcagcaggaattgggcgtcgatacgcgcttgcagctctttgcgttgggccagcagcaactcacggaagaagccttgttgggcctcattcatgtagtcgtcgggcagctgggccagcaggtcttgttcggtcatggagagcggttcacgggtcaggctgtgcttttatgttatagtataacaatacaaataagccaataccctcttgctcaccacgacgaagggcgcaatgcttgaacacttccctgccgcgagaaacctgatgaaatacctggtgtgcgccctgtttttggctgcggcgggacctgcctgcgcccaggcccccagcctgttggcccactgcacgcgcagcgccaacctgctggcttgtgtggatccattgggcaatgcctacagcgtggcgaccgtcggcagtaccacgtatttgcgcgggtatgaggtgatcggcaagcgctactgggcgcagaccaacagccgctacgggcagctgacgttctttaccgggttggcgtcggatggtgaggcgtgggtcggctacacgcggcgcgtgggctggaccaccctcaaccggttttccagttcgggtggcgccagcgccaaattcacctgcagccgtataacgggttgctagacctgggcgttcttctgttcctgcacccacgccatgtagctgttcatcggtgggttcttctggaaatactttttcaagccttcgaacaacccatcggcaactgcctgttgatgccgcgcggtgaccagccgcgcgctgtcccgcgcattggaaataaacccggtttccaccaaaatcgatggcacgtcgggtgacttgagcaccgcgaatcccgcctgttccacgcgtttctgatgcaggctggtgatgccttccaggctgcccaggatcgaattgcccagttgcaggctggaggcgatggtggcgttcatcgacatgtccaggatcaccccggcgagcatcgggtccttgtccttcagattcagcaggctggtggcgccaagcaaatcggcaccgttttcccgctgcgccatgaacctcgccgtggcggacgtcgcgccgccttcggacaaggcatacaccgacgcgcccgaggcagtaatgcgcggtgccgcgtccgcatgcacggagataaacatgtcggcattgtgcttgtgagcgatctccacccgtttgcgcagcggtacgaagaagtcatcgttgcgcaccaacttcacatcaaagcccttctcgcgcttcaagcgtttggccaacagttgcgcgatggacagcaccacgtctttttcgcgctggcccttggacccgaccgcgcccgggtccttgccgccgtggccggggtccaccaccacaatgatgtcgcgcttggggtgcgccttatccacgcgcggcgcaggttcggcggcaatctggcgaggcgcctgggtggcgttggtcaggtccagcaccaggcgatgaccctggccgtcctggggcggcaatagaaagctgttgagctgcatcggtgcgaccaggtccagcacgatgcgcgtatcgcctttaccaaaatgcccagagcgaatcgaggtgatgccgctgttcttcaacgccaactgagagaaatcaccgctgaggccggcgccgctgaggtcgatgatcaggcgttccggcgcgctcagggtgaaggtcttgtattgcaccgggccgctgagatcgaacaccaaccgcagcttgtcgtccgaacgccacaggcgggcgttgctgatctgcgtggcgtgggccgcgaatggcaaggtgaaaagagggctggccagaagcaggttaagaagctgacgtctgtgcatgaaaagtaccgcaaaaaaggagcgtccctgctcgacatgactgaaaaaaggctggcgcagaaaaaccatcgtcgacacaatagttatactataacatgtctttttatttccaatgatggacctgctcatgaatgcgctgactctgccggatatcgccgcgcaggcttcacgccaagccttgccactcgactgggtaggcatgtgcggcatcgccctgccaatcctcatcgacggccagcgcctcaccgccagcgccgatgcgggcgtgagcctggacgatggcgccgcccgtggcattcatatgtcacgcctgtatctggcgctggagatgctcgaccagcagccgcttacgcctgcacttctgcgtaatgtactgcagcgttttctcgacagtcatgaaggtttatctaataacgcctacctgcgcatccacactgatctgctgctcaagcgctcggcgctggtcagcccgttggccggctggaaaggctacccggtgagcatcgaagcgcgcctggaaaaacagatgttccacgtggaactaaaaattgacgttacctattcctcaacctgcccgtgctcggctgccctcgccaggcagttgattcagcagcaatttcttgaagactttggcaacaccccgctgcagcatgaggacgtgttgacctggctcggcagcgccaacggcatcgtcgccacgccccacagccagcgcagcaccgcgcagttgctgatcgaactggatggcgaccaacccagcctgcccatcaccgaactgatcgataacgtcgaagccgccctcggcactgccgtacaaaccgctgtaaaacgcgcggacgaacaagccttcgcactggccaatgggcagaacctgatgttctgcgaagacgccgcccgccgcctgaacctcgccttgaaacgctcggatgccgtcaaagccttccacctcaaagtgatccacgccgaaagcctgcacgcgcacgatgccgtggctgaaagccgctggacgagaaaccctgcatgatcacctgcaccgccttacgctggggcgccccgggccaaccactgacgcccggcgtcgacctcacccttgagaaaggcagcctcaccggcatcatcggcgccaacggcaccggcaaaagcagcctgctcaaagtcatcgccggcctgcaaaaacccttggcgggcaaggtcacggtggcggttccacgccgtggcggtctgtcgtttctgccccagcaacagcacctggaccgccagttccccatcagcctgcaggaactgatcgccgccggattctggggcacccagctctccccgcaacaacgcagccagcgccttgaagccgtgttggaggactggtgcctcagcggcctggaacaccgcccgttgatggcattgtccggtggtgagctgcaacgcgcgctgctcgcccgcatgagcctggccgaagcgccggtgctgctgctcgatgagccccacgcagccctcgatgaagaaggccaggcgctgtgctggaaacacatccacgcctggcacgacgcaggccgtacgctgatcgtggtctgccatgacctcgcttccgtgcgccaccacacccagcaggtggtgcagatcaaaaacaccggctgcctgttcggccccagcaaagagctgatccgcccacagccccaaatgcaggtggcctgatgcacttcgccgcccacctgtggatgcccttcctcgacttcgtattcatgcgccgtgcgctgatcggcggactggtactcgcctgcagcaccgcaccgctgggggtgttcctgatcctgcgacgcatgagcctgatcggtgacgccgtggcccacggcatcctgcctggtgccgccctcggtttctggtttgccggcctcagcctgccggccctaaccatcggcggcctcggcgccggcctgagcatggccggcctgtccgcatggatcacccgccgcaccggcctgcgtgaagacgccagcctggccgccatctaccccatctccctcgccgccggcgtgttgatcctcggcatcgccggcaagcgtctggatctgctgcacctgctgttcggctccgccctggccgtggatgaaaccaccctcaccggcatgctctgggtctcggggttcagcctgatcgccatggcggtgatctacagaccgctgttgctggacaccctcgacccgctgttcctgcaaaccgtcagccgcctcggcccactggcccacgggttgttcctgaccctggtggtgctgaacctggtgatcggtttccaggccatcggcgccttgatggtggtgggtttgatgatgctgccggccatcgcttcgcgtttctggagccggcgcctgccggtgttgatcgcagtatcggcggtgctgggatgcctgtcggtatggctgggtttgttgctttcgttctactactcgctgcccagcggcccggccatcgtgctggtggctggcgccgggtatctgctgtccgtggtcttcggtccggtgcacggcttgctgcgccgcccgccctcccttacatcccaatgaggtgtttcccgatgcgcgctttactcgtgctgttcagtctgctgctgccgctgtcgatggcccaggccgccgacaaactccaggtggtgaccagtttcagtattctcgatgacatcacccaccagatcggtggcgatcacatccagatcagcaacatggtcggccccgacgccgacgcccatacctacgagccaacgccggacgatgccaaggcgttgctcaaggccaagctgatcatcaagaacggcctgggcttcgagccgtggctggaccgcctggtggccagcaccgaaaccaaggccaccgtggtcaccgccagcaaaggcgtgatttcccacaccatggaagaagacggcgaaaccattcctgacccacacgcctggcataacctggccaacgccgaaatctacgtgaacaacatcaccaaggcgctggtcgccgccgacccggcgaacaaggcggattacctgcgcaacagccaggcctacctgaaagaaatctaccgcttgctggccgaagccaaggccaagttcggtgcgctgccagcaggcaaccgccgcatcgtcacctcccatgacgccttcggctacctgggccaggcctacggcattgagttcctggcgcctcagggcttgtccaccgaacgtgaaccctcggccgccgaagtcgccgcgctgatcacccagatccgcaaagacaaggtcaaggccgtgttcatggaaaacatcaaggactcgcgcctgctcaagcagatcgctgacgaaagcggcgcgcagatcggcggcacgctgtactccgatgcccttgctgcagaaggcccggccagcaccttcaccgggttgttcgagtacaacctcaacactctgtgtgcggccctgagcaagccatgaccctgagcatgctcgacctggaaggggctgccgtgggcagccgctttccactggaacctgtactcgatgcactgccgtggaacagcgacggcctgatcgccgccattgcccagcaacacggcagtggcgtggtgttgatgctggcctggatgaaccgccaggccctcaaggaaaccctggccaccgggcaagtctgctactggtcgcgctcgcgccaacagctatggcgcaagggcgaaagctccggccattggcaacagctggtcgaagcacgcctggattgcgacggcgacgctgtgttgctgatcgtcgaccagcaaggcccggcgtgtcacaccggccgccccacctgcttctacaacgctatcgatggcgaccacgttcacatcatcacggagccctcagcatgatccgcaaaaacccgtccggcgatcttcccgtcattgccgaatcggcctacgtcgacaagaccgcaatcatctgcggcaaggtcatcatcggcgagaacgtcttcgtcggcccctacgcggtgatccgcgccgatgaagtcgacgccagcggggacatggacccgatcaccatcggcgccaactccaacatccaggacggcgtggtcatccactccaagtccggcgcggccgtgaccatcggcgagttcacctccattgctcaccgctccatcgtccacggaccctgcagcgtcggcgaccgtgtgttcatcggcttcaacagcgtactgttcaactgtgccgtgggcgatggctgcgtagtgcgccacaactcggtggtcgacggccgcgatttgcccgccgccttctacgtgccctccaccacccgcatagggcccaacaccgacctgtcgcaattcccgccggtgagcgtgagcgcctcggagttttccgaagacgtggcgcgtaccaacgtcgacctggtgcgcggctacaaagccctgcaaaacgagttctgagccatgagccgcgtgctgattcgcaatgcccgcctggtgaatgaaggccaggaattcgacgccgacgtactggtcgccaatggccgcatcgagaagatcgccagtagccttgacggctataacgagccggtggaaatcgacgcccaaggccagtggctgctgccgggcatgatcgatgaccaagtgcactttcgcgaacccggcgcgccggacaaaggcagcttctacagcgaatcccgcgccgcggtggccggtggcatcaccagcttcatggacatgcccaacaccagccctgccactttggacctggaaaccctggccgataaaaaacgccgcgccgccctgcattcggtggccaactatggctttcacttcggcgtgagcaacgacaacctcgacaccgtcgccgccctcgacccgcatgaagtcgccggggtcaaagtgttcatgggtgcgtccaccggcaatatgctggtggatgacccgcggatcctggagcgactgttcgccgaagtgccgaccatcctgctggcccattgcgaacacacgccgagcatccaggccaacgaacaacgtttgcgcgagcgcttcggcgacaagatccccgccgtcgcgcacccactgatccgcgatgccgaggcgtgctatcgctcctcgtcctttgccgtggaattggccaagcgccatggcacgcgcctgcacgtgctgcacctgaccagcgcccgcgaactggcgctgttcgaagacaaacccctggccgaaaaacgcatcaccgccgaagtctgcctgcaccacctgctgttcgatgaccgcgactatcaccgcctcggccaccagatcaaatgcaacccggcgatcaagagccgcgccgaccgcgacgccttgcgcctggccttgttgagcaaccgcctggatgtgatcggcagcgaccacgccccgcatggctgggcgcaaaaacagctggattaccgtgaagcgccggcgggcttgccgctggttcagcatgccctgcccgcgctactggagttggtagccgatgggcacctgccgctggcgaccctggtcgcgaaaaccagtcaccgcgtcgccgatctgtttgccatccccgatcgcggttatctgcgcgaaggctattgggccgacctggtgctgatcaaactcgagcccggaggcaaaccggtcagcagccaaccaatcctggcccgctgcggctggacgcctttcgccgagcgcagctttcgccatagcgtcagcaccaccttggtgtccgggcacctggcctttcataacggtcaggtaatagacagctgccaaggattacctttgcatttccagcgctagagaagacggcgatgatccgcatcaccctgccagacggcacccaacgcgagtacgacggcgctttgtcagtttatgaagtggctgccagtatcggggcggggctggccaaggcagcggttgccggccgcgtcgagggtgagctggtggattgcgagcacgtgctggaacaggacacccggctccagatcatcaccacccaggatcgcgaggggttggaaattctgcgccgctcctgcgcgagcctgttggcgatggccgtcaaacaactgtttcccagcgctcaacgggtagccggggcggtagtcgaagacggtttttactttgacttggcctacgaacgcgtcttcacaccgaccgacctggaactgctcgaggcgcgtatgcgccagctggcaaacaccaatcattcggtacggcgcttgggagattttgacgccccaagccaaggccccctcgtgccgagcacgggtgtgatccaggccttcaaactgaccagggttgtcagcaatgcgtcacagcagcgcatcacaggcacctgctgggccagccagcaggtggcggtgctcacgatgagtcaacaccaggtcgacttcggccagcaggtatgcgatgcactgaaaggcgtgggcgtgcgggcgatcatggaccggcgcagcgagaagatcggctacaagatccgcgaacacagcctccacaaaacgccgtatttggtgatagttggcgagaaggaaaaaaccggcggttacgtcagcctgcgtagccaccggggagaagacctcggccagatgagcgtcgaggccttgtgcgaaaggcttaagcgcgaggcttgaccgtaccgcaatcgttacccagccactgggcgtggctgtccaggctgcccttctgctgaatgccggtggcattgaaggtgccgttgacggtggtcgtaaactctttctggctttggaacgtagctacacccgtgccctgggctttcgggcaactgaaacggaatttccactggttgccggtcttgtcggtcacttgctgtttgcagcccgattgcgggtcggtcagggggatagaatcagaggccacctgtgccggcgtcaggcacacctgcacgcctttgccagccatggtgatgccttgtttttccagcatggcgcgctgctcaggggtcatctgctgcttgagttgaccgaggatcagcgacaggtccggcaggtcctggttatcgactttcatattgctggtggtcaattcccacaagcccggcgccagcatctgcgcctgtgctgccacgggcagcgacaaaccaataaccatggctaaaccaaacagacgagcattcatcgggtaactcctgggcaattgttggcgttagacgccgcaaaggcgtcagtgttgcacgccaaataaaatagcgacattcgtgaccgaacatggtctgttaggcactggattgtctggagtaccgtcgtccatggatttttttggcccgcacctgctcgcctacttcatcgccacgctgcactttctcgggactctcgccgcgatccacgcggtgctgaccgtcaggaccgcccaaggctcgatcgcctgggccttgtcgctgatgttcatgccctacctcacgttgatcccttacctgatcttcggccgcagcacgttcgacgcctacatccaggcccgccgccaggccaaccaggaaatgcacaccgcgatcaccgcgctgaactggcgcccctgggtcgaggaagccctggcagcacgcaactccagcgcctacacctctttgcgcgccatgcccaagctgggccgcatgccgtgcctggccaacaatgaagtgcgcttgttgatcaatggcgaggccacgttcagcgcaatcttcgaggcgatccgcaacgccaggacagccgtgctgttccagtttttcatcattcatgacgacgagcttggccgccaactgcacgccctgttgaaggaaaaagccgctgaaggcgtagacatccacgtgctctacgaccgcatcggcagccacgccctgccccatcgttatgtacaatcgctgcgcgacgccggggtaaaagtcaaagcgttcgccacccgcagcggctggctcaatcgcttccaggtcaacttccgcaaccatcgcaagatcgtggtggtggacggcatcaccgggtttgtcggcgggcataacgtcggcgatgaatacctgggcaagaaaccaccgctggcgccgtggcgcgacacccatgtgcaggttaccggcccggtggtggcgtgtttgcaggagtcgtttgccgaagactggttctgggcggcacgcgagttgccgccgctgatcctgccggacgcctacccggaagacggcgtgctctgccaattgcttgccagcggtcccgccgccccatatgaaacctgctcattgttttttgtcgaggccatccacgcggcgaccgaacgcgtatggatcaccagcccgtacttcatccccgacgaagccgtgttcgccgccctgcgcctggcggtgctgcgcggggtcgatgtgcgcctgttgctgccctcacggcccgaccaccgcatcgtctacgcggcgtccagcctttacgcgatcgaagcggtgcgcgccggtgtgcgggtgttccgctacacgccggggtttctgcatcagaaggtggtgttggtggacagcgaaatcagcgccatcggcagtgcgaacatggacaaccgttcgttccggttgaatttcgaagtgatgttgctgacggtcgacgaagccttcgctcgggaagtcgagcagatgctgctggacgacttcgccctggcccacgaggtcagccagcaagaaagccgcgagacccgccgcctgcaacaactgggcatgcgggtcgcgcggcttatttcaccgattctctaacacactgcggtgaaccctgtgggagggggcttgcccccgatagcggtggttcaatcaactcaggcattggctgacacaccgtcatcgggggcaagccccctcccacacttggaccttcattgttctcagaaacggggttagcggtagatatcttcccgcgtccacggcaggtcgtggctgccatcggcatggggtttcaccgccaggatctggtgcaggttgatccagccccgggcaaacgcgtacgcacaaccggccaggtacagccgccagatgcgtaacgcctgctccggcaccatcttcgccgccgcttccaggttgtcttccaggcgctcgctccaatggtccagggtgcgcgcgtagtgcaaacgcaggctttcgacgtcgaccacttccagcccgacttcactgagttcgacggtcatcatcgccaggtgcggcagttcgccgttggggaacacataacgctcgatgaactccccggcgccacgaccgaccgggcgaccatcggtgtgcttggcggtaatgccgtggttcatcaccaggccgccttcgcgcacggcgccgaacagggtctggcagtactgcgccaggttggcgtggccgacgtgttcgaacatgcccacgctcaccactttgtcgaaacgaccgtcttgcggcaggtcacggtagtcgagcaattgcaggtccacctgatcttccaggccctcggccttcacccgttcccgggccagtgcgagttgctccttgctcagtgtgatgccaaacactttgaccccgaactcccgcgcggcaaaccgcgccagcccgccccaaccacagccgacatccagcagatactcgcccggctgcagccgcagcttgcggcacaggtggcgaaatttgtcttgttgcgcctggtcgatggattcgctgccggtttcgaaataaccgcaggagtacgccatatcctggtccagccacagctggtagaactcgttggacaggtcgtaatgataggaaatggccgctgcgtcggtggccttgtcgtggatcgagcgcaccggacgactcccctcgtcgtcttcgatcagggcatgactcaattcgtcacacacccggatgacctcggagatagagccttccagctccagtttgccctcgacgaaggcttcgcccagtgaatcgagcgtgggatgggtcagcttggtcacgaccgtggggtccttcaccacgatggtcacactgggctcggggcccaagttgaattcatggccgtcccagagtcgaagacgcagcggtagctgaagattctgtaaggccggtggaagttgcgcgagcatgagtagtccccccttgtttcagacgtctgctgtgagggtagaccatcccaagacaaagtaggaggctatcgatttgatagccgtcttctatggggctcggcgctcgagcaaaccgtcctggacccactgtttcagccacgtcacggcctgcagtggggcaccctctgcataagtgactgccagttccgcgcacagttctgaaaaactccagccggtggtcaccatgcctgccagggcgcagacttcagcgggttccaggctgcggtaatggcacacattctggtgccgccacaccaggcagatgtgcgccgggtcgagcgtatggctgtgggggaagtctgagtcatccttgctggcgcgccagatcgccacggtattgaagtggcagaggacctgttgcacggagggcgccagcgtgacttgcaggcccggccagtcttcaggcgccaggcttgccatgtcgtggagggtcagcggttcgccctgcggcgcatcaaacgccagggtaaacgcccactccaaccgcgccagctccgccagcggcgcactttgctccgccaccaggtgctcaaggataaacgtcgggaaacgctcacccaaccagcgcaggctgtaatgggccgagggataacggcgcacgtaggctttggtcagcgcggcgaattcatcatcccccaaccaatagtgaatggcgctgaagtcatgccgcaagacgtcctgcaaccgcgagatataggcgttgtgataaatcgccaggcccgtgtccacatccagcgtcggcccgcccagcagggtcgcggcgaagccactgttggccacgggtgtttcggataacaggtgctgttcaaaggccaactgccaatcggtcaggcgcataaaggtctcctggccaacgccatggcccccagctcacgggccttgctcagctcggtcagcaactcttcgaagggtgggaaatggtcgtcccgctccaacagcgtcgacacagggcccaggtgctccagcgtttgttgatagagcgcccacaccgggtcacacacagggtggtcatgggtatcgaccacgtagtcgccgtagtccatgtgccctgccaggtgcagctggcggatgctctgcggcggcaggttgcggataaacgtccaggcatcgaaaccatggttgcgcgagctgacgtacacattgttgacgtccagcaacaactggcaccccgacaggtgggccagggcgttgaggaattcccactcggtgaattcatcggccttggagcgcacgtagctggagacgttttccagcaccagcggacgttccaacacatcctgcacttggcgcacgcgggcggccacgtggtagaggctttcttcggtgtaaggcagcggcagcaggtcatgcaactggtgggcgctgccgcggctccagcacaggtgatcggacacccacgccggctggatacgctcggcgagctgtttgatctgcttgaggtagtcggtatcgagggcatgcggcccgccgattgagagggacacgccatgcatcaccaggggataacgctcggctatcgcatccaggtagtacaaggctttgccgccctggaccaggtaattttcggagattacttcgaaccaatccacggccggcgactgttcgaggatctgctggtagtactcactgcgtaaacccaggccgtaaccgaggcttggaagggaggcaggcataagacactcctgggaagtgtccgcagcggtgaggggcagccgctgcgggagcactgggttgccggttattcgccgacggtgccgcccttggcgtcgcacatcgacttggtcatcgacaggaagccctggcctttgcaagaaccctgacctttgcacgcatggtccttggtcttgcagtcgttctggcctttgcaggcgttgacgccatagcagtgaacggtggcgtctgcagcctgcacctgggtggcaacaccggcaaacatagtggcggcagccatagcgagagcggcaccagcagcagcggatttgatgttcattgttgtgttcctcatgatcgtaggggtgtcggtctgaacggattgttcagtctcgacataccactagagtgaggcccctcatccgcgttacagctgtgtgcaaaaatttctgaaaattattcttcaagcttcaaaaggggttcctgaaagcgcagcaaacgcccggcattgcccagtaccagcaaggtactgaggttatgcaacaccgccgcaatcatcgccccggcagcgcccaaccagccaaacgcggcgaatatcacgatagccaaggtccagcccagaccgatgatcacgttgacctgcagcgtctgccggcactggcggctcaagcgcacgcacgtccccaggcgccgcaagtcactgccgatcaacaccacatccgccgacgccagggcgatatccgccccgcccgcgcccatggccaccccgaccacaccggccttgagcgccagcgaatcgttgatgccatcgcccaccaccatcggccggaaaccgctgccgatttcacccagcacgcggttgagcttgtcttccggcagggcctgggcttcgacgtcgctgatgcccacgtccagcgccaggctgtccgcgacgctctggcggtcgccggtgagcaacagttggcgaccaaggccgaggtcacgcagctcttgcagggcctggcgggcttccggcttgacgctatcggccagcagcagccaggccaggaactgaccgttcaacgccagcccggcgatggggccatcgtggttcggcaccgcggtggtcaagatgcccaactgctcgaataactccgggcggcccaaggccgcttcgccctgatcggtctgcgccaccacgccgaggccctggcgttcgcggatgtccgtcaacgccagcatttgttcctgcgtcgccaaccccgccaatgcccggctgaccgggtggctgctggccgagcccaggctcgccgccaggttcaacagtacctgccggtccggcgccgtggtgtcgatggattgcaggcgcaaggtgccaaaggtcagggtaccggtcttgtcgaccaccagcgaggtcaggtccgccagctcttcgaggaacgccgagctgcgaatcagaatcccatgccgcgccgccacggcgatcccggcaatcgccgtggccggtgccgacagcaccaacgcacacgggcacgccgccaccagcacggcgagcatcgcctgggcgtcattggtcacaaaccaagtcaccgccgccaacagcagcaccagcaccatatagctgccggcataccgctccaacagccgcgtaatcggcggcttggaacgctcggcgttctgcatcagcgcgatgactttgcccagggtggactcgttcccggtgcgggtcacttgcaggcgcagcaacccatcgaggttgatcgccccaccaaacacctgcacacccacgctggcttccagcggtaccgactcaccggtaatcggcgccgtgtccaggctcgcctggcccgacagcaccacgccatccgccggcacccggtcgccggcacgcacctcgacgatgtcgccggtattcagcgtgccgttgtccacttcctggatgctgccatcggcctgcaccaaacgcgcatggctgcgggtcagcttgcccagggcatggatcgcctcctgggaaccgatcacgctgcgttcttccagcacatggccaaaaatcatgatgatcggcaacaacgcggcggtcagcaggtcacccgtagcccaggcgcccagcatggcaagagcgatcaactggtcggtgataccgtgcaggctcgggaaccgcaggctgtaccaggccgaacgcatcaccggcaccgccaccaacagcgacgcgacacccagcagcaactggctcacgccgctctggtccggcgccagccagcgccacaccaggcccagcaccagcaaccccagggccagcatggccagggtcaattgccgggcagcactgcgttgctcggcggaggtcagcatgggtgcgctcattgttcggctccctggatgatcaagcgggagtcgtctttcggatcgaccgtggtcaccgaaccggcctggccgagaatcttcggcaggcgctcgcggtacaggcgcagcagcaagcccgggtctttcacctgggccaggctggcgaccgtggcggtttgcgcctgggcattggccaggcgttcactggcctgggcatgggcgacttgcaccaggcggtcggcctgctgggtcgcggtctgggtgagtttctcggcgtcggtgcgcgcgttggccacggctttatccgcctgctggctggcggtgagcaccgcattgaaggcattcaccgccgggcccggcaggctcgactgcacgtcgacgcgggtcacttcgatgcccaaccccaagcctgtggaagccaactccacgagacgcttattgatgccttgcaccaggtcgccgcgcagccgttcgcgacgttcggcggcgccgttgtcggtgccgatcagttcggggcgtgccaccaggatcgtatccaggtcacgcgcagcggtcagggccacggcgctgcgggtcaccaaccgatccagggccggcagcacatgctcgccctgcaacacaaaggcgtaaggctcggtgactttgtagaacacccgcacatccagctgcaccacgccggcatcgccagtcagcaggtaaccggaaccggccagtgcatcactcaacggcgtggcaaaactggcgacgcggtcggcctgggtcgccgcatcggaacgcaacaggttctccacccgacgctcgatcacccggtcggccgccggcaacagcaccacctgctcgaacggccgcggccaggccagcaacagcccggcattctggatgcggtcgagggcgccgaagtgcagcaccacagcgcggttctgcgggtcgatctggcgcacattggaaaacgcccaggccagtgccgccaatacagtcaccgcatacagcgccaggaaggccaggcgcccggcctggatccacgggctgtccgggctgtcacgctcggtcatggctggatgtccttcggcccatccaccaacgcgcggaacggtgcagcgtcggtgcgcaggatgatcttggtgcccggcgtgaccacggtgcccaaggtatccagcgagcgcagcaggttatacaactgcggattgccggcgtaggcgcggccatagatctgcgcggcttcgacccgggactgggcctcgatatcggcggctttcaccgtggcgtcggcctgcacgatgcgcgcatcgcgctcggcggcagagcggatctgcgccgcctcgcgtttgcccacggcggtacgttcggtggcgatggtttcacgctcggcgcgcatgcggtcgacggtggccgtcagggtcaccgacggcagcgtcagccgttcgatcccgacctggaccacgcgcacgccgtaggtattgagcaattgttgatcaatctgctggcgcagttgtgcttcaaaatcagcgatgcgcacctggctggcatcggtgttgatcaggctagacaggtcgaagctggccgccgtggtttccagcgccgagccgacaaaggtgcggatctgccgcgccgcttcatccggctggttctgcaccgcacgcatgaagcgctgcacattatccgcatcgccctgcacctgccacgccacgtacgcctgcacgatgatgcgcaggccatcgcgagtgcccacatcctgcaaaccgctggaggtggtgcgcaggcgcaagtccaccgggatcgccgcttcgaacggcgccggccaacgccagcccaggccgggctccagcaacacccgcgccgggttgccgaaccgggtaatcaccgtggcctcgccggaccgcacctgcaccaggctggcggccgcgaccgcaaacagcaccagcaacaccgcccaggccatgcgccgccaggggaatgggccggcgtgctcatcagcgtgatgatggtggtggtgatggccatgatgatgaccgtgatcgtgagaatgagcgctcaacggaccgactccttattgaacggctttacgcggctgcgaaggatcggccggcaaggtaaaagaacgcagatcgatcgttggcgcgccatcggcgcccaggcgatgatccaggataagcagcttggcgtgggccaggccctggctgagttgacccaagtactgttccagcacgaacgcctggccggcggtggcgtaggccttttgttcggcggcaaaacgcaggtcggcggcctgggcgccggcgttcacttcgcgggcggtggccgtggcctggtcgcgggcggtgctggcttgcagcacggcctggttggtttgctcgctggccgcgccgcgctcgcgggagatcagcgcctgggctccgatctgcgcggcttgcacgccgtggtaggcgttggcagcgccggccggtgggtggatcgcctcgaccaccgtggcgaggatttccacaccgctgccgagcgtttgcaggtcagcctgcacggcgcggccgatttcgtcggccaggttcgtacgttgctcgccgagcaattcgtcaagggtgcgcgaggcaaagtcatgcaccaggatgcggctggcggtgctgcggatcaggctcggcacattggcgctgttataggtggcagcgagcgcggcctggtcggtgaggccgatgcggtagacgaaacgcacgtccatgttgacgatctggaagctctgcttgtcgccgctgctgctggcgatcacctgggacttgtcgttcacatgactggcgtcccacaagcggttggcgatcagcggcgccgggccttcggcaggcgccaactccggcgtagcggcgtcgctgacgctggtggccagctcatgcaccacgccgttctcgacgctgatcacacgacccaacggccagggcaagccagcatgcaaaccggggccgaacacctcgacgggcttgccgaagcgctcataaatcccacggccttgcaggggcacttcgtgcacgccggtgagcacccaacctaccgccagcaccaccagcagcaccggcaggaacgcccggcgcatgtaggtaaacgcccagatctggcgcaggtcgatgccgaagcggttgtgcaattcgtgctgcaaggcgagcaagggttgaggcggccagcgcagcagcccggcgatgaaactgtgcgccatcaggcggggctcaaggcggggctggcgtgggctgaacagcgacaacacggccctcagtacaaactccagcgagaccagtgccggcagcaggccgatcaacaccgccaggcgcaatggccagatggactcggcaccagcgaacagcaggcaaatcgcgctgactaccaggcacacaatcgccacccgactcaactgcgcgagctgcccggcttccggccattgcgcggcggtttcctgggccaggcgacgttcgaacaccagcaagccaaacgccagggccaacgccagcgcggcgccgatgctggcagactggccgaccggtgcagcgggcaaccccaggttccagaactcgacaatgctgatcaacgccagcaacgaccagccaccaagccacaacacgggtgcgccgatctgcttggcaaaacgcagcataaagcgtgcatagcggccggggtcttcaagcggcacttcaaccgcaggttcttccaacgcttgggcgcgccaatccgccacccaccacgccgactgcagcccggccaccagcaacagcaacgccgatgcgcagttgatcaacaccaccggccagatcgacagcggcgcaaacagcgcgacaaacagcgccagcacccaaccggcaacggccagcaccgtcaggctgataccggcctggcgcaatcgacgggcatggaactgcccttgttgaaaacgcggaaggccttctaccgaagcaccgtcagtttccagatccacttgcatccactcaacgcccacgtgtacataattcgttacgatataacacggagcgtgaaatttttgttcgataaacatcgcgttaagcggtacaccgttcccctgtgggagggggcttgcccccgatagcggtgtgtcagtcaacaccggtttcaactggcccatcgccatcgggggcaagccccctcccacatttgatctcccgcaccgtcaagatcgtgactaaccccccagaaacacgcgccatcactggtgcaggcgaggattaatcggcacactccaaaacagtttttcgcgggtccacggacaaggaagcgtcaccccccatgatttcgatctatcagctcaaaccgcgttttcaaaacctgctgcgcccactggtgcagcgcctctacgacaatggcaccaccgccaaccagatcaccgtcttggccggcgtggtttcgctgctggtcggcctgctgatcgccagcttcgccacccacctgtggctgttcgcgctgattccgctgtggatgatcctgcgcatggccctcaacgccatcgacggcatgctcgcccgggaattcggccagcagtcgcgtctgggcgcctacctcaatgaactgtgcgacgtgatcgccgacagcgcgctgatcctgccgtttgcgctgatccccggtgtgagcctggcgccggtgctgctggtggcgctgctggcggtgttcagcgagtacgccggtgtgctggggccgatggtcggtgcatcgcgccgctatgacggtccgatgggcaagagtgatcgtgcctttgtactcggcgtattggccaccggtgtggcactgggctggctgggcgccggctgggtcgacgcggtgatgtggctggtggctgccctgctcgcctacaccctggtcaaccgggtgcgccagggccttaaagaacaacaagaaacctcaccgattgcataaggacttttgcgatgcgcgaacagcagcagcacaccttcagtacccatgatggcgtcgagcttttttatcggcactggccggccacggaaaacaccggccagcgccaggccatcgtgctgttccatcgcggccatgagcactcggggcgtatcgcccacttggtggatgagctgaacctgccgcaattcgacttcttcgcctgggacgcccgtggtcacggccagtctcccggcgagcgcggtgacagccccagcttcgccaccagcgcccgcgatgtgcagaccttctgcgaccacatcggcgccacgtatggcatcaaggaagaaaacttcgccgtcatcgcccaaagcgtcggcgcagtgattgccgcgacctgggtccacgattacgcgccgaaaatccgtgccctggtgctcgcctcgccggcgttcaaggtcaagctctacgtgccgttcgcccggccgggcctggcgttgatgcgcaagttccgtggcaactttttcgtcaacagctacgtcaaggccaagttccttagccatgacccggagcgcgtggcgtcctacgacagcgacccgctgattaccaaggccatctcggtgaatgtgctgctgggcctgtacgaagcggccgaccgtgtggtcgccgatgcccaggcgatccaggtgccgacccagttgctggtctccggctccgacttcgtggtgcaccgcaaaccccagcagcagttcttcgaccgcctgggcagcctgaaaaaagagctgcacatcctccccggtttcttccacgacaccctcggcgaacgtgatcgcgccagcgccgtgagcagcgcccggcgcttcatcctgcagaacttcgaacacccgctggaccgcgcttcactgctggacgcggacaaactcagcgccacctgcgccgaatccgaagcccttgccgcaccgctgccgcgcaactccctgcgcgacctctactggcgcatgacccgcgccagcatgggcttgggcaagaacctgtcggacggggtgaaactgggcttcgacaccggtttcgactccggcagcaccctggactacgtgtaccgcaacacgcccaccggcaagggcgggctggggcggatgatcgacaccaactacctcaactccatcggctggcgcggtattcgccagcgcaagctgaatgtggaggagctgctgcgcctggcgatggccaggttgcgcggtgaagatcgtgaagtgcgcatcgtcgatatcgccgccggccacggtcgctacatcctggaagccttgcagggcgtgtcgccactgccggaatcgatcctgctgcgcgactacagcgacatcaacgtgcgcgacggtggcgcgttgattcgcgagaagggtttgggggatatcgcgcagttcgtcaaaggtgatgcgttcgaccgccaggacctggcggcactcgaccccaagccgaccctcgcggtggtgtccgggctgtatgagttgtttgccgataacggcatggtcggcggttcgctggccgggctggccgaagcggtggagcccggcggttacctggtctacaccggccaaccgtggcacccgcagctggagttgatcgcccgcgccctgactagccatcgccagggccaggcctgggtgatgcgccggcgcagccaggcggaaatggatcaattggtggaagcggctggtttccgcaagatcacccagcgtgtggatgagtggggcattttcaccgtgtccctggcacagaagatctgaacatgcgcgaacccggtttattgaaacctgcggtgctgtggctgctgctgttggcgccgctgttcttcagcacctacggctttgccacctgggtcaccagccagcgcagcgacgtcgtcacgctggtgttcggctgggaaacccatatgccgttctgggcgtggaccatcgtgccctactggtccatcgacctgctctacgggttttcgctgttgttgcccaacacccggcatgagttgaagcaacatgcgctgcgcctgctgagtgcccaggtgatcgccgtgagctgcttcctgatctggccgctgcgtttcaccttcgaacggccggaactggacggtgtgttcggctggctgttcgcggtgctggccgggttcgacaaaccgttcaaccaggcaccgtcgctgcatatcgcgctgctggtgatcctgtgggtcatgtaccagcgccacacccaaggcttttggcgttggctggtgcatggctggttcgggttgatcggcatttcggtgctgaccacttatcaacatcactttatcgacttacccacaggcgccctcgccgggtggatctgcgtgtggttgtggccggtggaacatccgagcccgttgttgagtgcacggctgacgcgagatcccacgcgttggcggttgggcatgcaatatggacttggcgcgatgctgttggcgattccagcatttgtattgggcggcgcctggctgtggctactatggccggcggttgccctcgccttgatcaaggccaattacttcgtgctgggcgcttcgggcttccagaaacgcaccgacggccaactgacccccgccgcacgctggctgtacgcaccgtacctagccgccgcctggatcaactcgcgcctgtggacacgcaaacatccacagcccgacctgattgtggataacgtctggctcgggcgtattcctaccacaagcgagcaagcgcccttcaaggccatcgtcgatctgtgtgccgaattgccgattaatccacaggggcgcgcctatcaatccatccccgtgctggacctgatcgcaccgaccccgaccgaatgcctgcaagccgcccaagctatcgagcatctgcgcgccagcggccccgtgctggtgtgctgcgccctcggctactcgcgcagcgctaccgccgtcgccgcctggttgctgcacaacgggcgagccgcgacggtagagcaggcgctgactatcattcgtacagcacggaccgatgtggtcctgcatcccgcacaccgagaagcgttggagggtttgccccatgcccgctgatatggaactgctggtggttgccagcctgctgcgtcgtggccgttcgctggatcagttatccacaggcctgaccctggccggtgtgctgttcggcctggcgcagttgttgatggcgagtatttcgatcatctgcctgctgctcagcctgtggatgattatcctcgggctgctgcaaaagtactgggcgctgcgcgtggcgttcgacgccgacctgttcgccctgctggcccgcgacatcgagcgcacgccggacctcgaccaggcactgctgaccctcggcctgcaatcggccaagcgtatcggccggccctggaccgaacgccgtcgcggcgccctcaaactattgcgcaaacaagcctggctgctcggcgcgcaagcgctgctgaccctgggcgtgatcctcgccagcccctggctgcctttcgccggataaggaatccccatgttcgaacccgtggtcgccacgctgattacctccatggcccgcaccgtcaccggcgcccgcagcctgtggttgggctgcgcgccggtgccagtgcaacgcatctacttcgccaaccacagcagccacggcgactttgtattgctgtgggcgtcattgccgcagaacctgcgcaaattcacacgtccggtggccggcagtgattactggaacaaaagcgccttgcgccgctacatcatcaaccgcgtattcaacggcgtgttgatcgaccgcgaacgcaaggaccctgtggataaccccttgcagccgatgctcaacgccctggaaggcggtgactcgctgatcattttcccggaaggcacgcgcaacctcgaagacggcctgctgccgttcaaaagcggcctttatcacctggcgaaaagttacccacaggccgagttgatcccggtgtggatcgccaacctcaaccgcgtcatgcccaagggtcgcgtgctgccgctgcctttgttgtgcaccaccagcttcggcgccccgctgcaattggcagacggcgaagacaaagccgccttcctcgcccgtacccgcgatgctctgctcgccctcgccccggagcacgtctgacatggctagccaaaccctgatgttgttcggcggtatcggcgcgatcctggtgctagcctcgctgatcggcctgatcctcaagctgcgcacccgtggcacgcccaacacggtgatcgacaacctcaacgcccggatcaacgcctggtgggtcatggtggtggtcatcggcatcgccttctggctcggcaccggcgcggtgatcctgctgttctacgcggtgtcgttctacgccctgcgcgaattcctcaccctcacccccacgcgccgcagcgattaccccgcgctggtcgccgcgttctacctggcgctgccgctgcaatacctgctgatctattcggactggtacgggctgttctcgatcttcatcccggtgtacgtgttcctgctgctgccgatcctcgcctccctgggcggcgatagcacgcacttcctcgaacgcgcctcgaaagtgcaatggggcctgatgatcgcggtgttctgcgtgtcattcgtgcccgccctgctcaccctcgacattcccggctacgaaggccgtaacctgctgctgatcgcctacctggtgatcgtggtgcagctgtcggacgtgttgcagtacgtgtgtgggaagttgttcggcaaacacaagatcgcgcccaacctgtcgccgtccaaaaccgtcgaaggcttcgtcggcgggattctgctgtcatccctgatcggcgctgcgctgtggtggaccacacccttcaacccgtggcagtcgttcctgattgcactgctgatcaacctgctcggctttgccggcggcatcgtgatgtcggcgatcaagcgtgatcgcggcgtgaaggactgggggcacatgatcgaagggcacggcgggatgctggatcggctggattcggtgtgctttgcggcgccgatcttcttccacttggtgcgctactggtggacctgaagtcaccgctccaaggccaaataacgatcaacatgtgggagggggcttgcccccgatgacggtgtgccagacaacacatgggtagctgacacacagcaatcgggggcaagccccctcccacattcgttctgtggcactgtgccgaaaggttgaatcattccctcaaggctgccggctccctgatggaaatgcccgcgttttcgttaacgtttttcgcgagcaagctcgctcctacagtgattcaccgccattagcccggcaaatgccccagcggcaacgtccctggggttttcacggtctggatcgcgaagttgctgcggatgtccctcacgcccggcagcttcagcaaactacccgtgacgaaccgctcatacccgcgcaaatccggcaccaccacctgcaacagaaagtccgactcccccgacaccaggaacgccgagatcacttccggcaacgccgtcaccgcctcgcggaaggcattggcctcggtgtcgttatgccgctccaccttcacgcccacgaacaccatcatccccagtcccacttcgtcacggtccagcgtggcctggtagccgcgaatcacgccggcttcctccagcaggcgtacccgtcgcaagcaaggcgaggcagacaggccgatttcgtcagccagttgcacattgctcaagcggccgtcacgttgcagggcttcgagaatcttgcggtcaaacgcatcgagtttcagatttggcataaatgaatggccgatcagatattcagtggcagagagtgccaagactagacgcttttctggctgactacgcaagcacctgccccgcccttgcgccctagaattggccgacacacaaggggggtgaaacatggcggaactctggttattcctggtggctctttcggtggcgtatctactgccggggccggacatgatcctgctgctgcaaaccggcgcacgccagggcaaggccttggcgctgaccacggcgattggcctgggattggcccgcgcctgtcatgtggcgctggcgggcatgggcttggcgacgttgttcaaagtggcgccctggaccttcgatgtggtgcgcctgggcggcgcggcgtatctgctgtggcttggcgtgcagtgcttgcgtgcgaacatgctgccggtactcgacacggcccatagcgccacaccggcccgcgcctggcgtgcagcctttcagcgcggcctgctcaccaacctgctcaacccaaaggccctgctgttctgttcggtgctgctgccgcaattcatcaacccgcaatccggccccgtggcagcgcagttcgcgttgctgggtgtgatcctggtggccgtcggtttcgccttcgactgttgctacgccctggccggggcgcgcatcggtcagtggctggcacgcaatcgctcggcgcagcgtgtgcagcagtggttattcggcagtcttttgatcggttttgcggtgcgcctcacctttgtgcaacacgcctagcgggtcggcgtatctgcgtcatcttttgtatcaaagacgcgtgtaagatacgccgcacttagccagggatgctcaccatgttcgattcgttcaaagcgatcagccgccgtattgtcggtgcgttattgactgtggtgggggccgtctttggccagtggcatccgccggtctggctgcgtgccgttggccgtgggctggctaacctgggcagccaagcccgcgcttatccacgtcaaaccggtgccggcgtagtaggcctggcgttgctggcggccgctggtttctatggctggcactggtattccaacctgccgcaaccacataccgcgagctattcgctgcacaaaccgaacctcaccgactacacccagcccacgccggttgtggataacttgcaggtgcgcttcggcgaatccgtggccccgctggcggccatcggcaagccggtcactgagggtatcaccctaaaacctgcggtcgcaggcacctggcgctgggcggacgaccgcagcctgttgttcgtcccggaaaaagactggcccatcgacgcccattacaccctcgacctggcgaagaaaaacctgctggccgacggcgtgttgctggaccagtacagcacgcagttttccacccaaccgttccgcgccaccctggcgcaaaacgagctgtaccaggacccgtccaacccgacgctgaaacagctggtggcgaccttccgtttttcccacccggtagatgaagacagcctacgcaagcgcgtcacagtaaccctcggcaaaggcttggcctaccgcgacgcccagttgcccaaccggccggaaatcaccttcgacgagaagaaactcaacgcctacgtacgctccgctgccctggccacgccgctggaaagcacgccggtcaacgccaagctcgacgaaggcatcaaggcccgcgacggcggcaacgccagcaccgcaccgctggtggcggaagtcaccgtgcccggtcgctatcgcctgacctttaccggcgccgaagtgagctttgtcgacaaccaacgtggcgagccggagccggtgctgatgttcagcagttccagcgccgtggccgatgagaccatcgccggtaaggtgcaggcctggctcctgccggaaaaagcccaggacgacacgcgcccctacagcagcaacgacatcgatgacgccctgctcgcccgcagcaccaaaatcaacctgacccacgtgcccagcgtcgagccgctgaacaccctgcacgccttcaagttcaaggccccggccggtcgcgcggtgtatgtgcgcgtacccgccaacctggaagccatcggcggctacctggcaaaaaatcctacggcgtcgctgatcagcatgccggcgtatccgcgtaccttgcagttcttgtccgatggcgccttgctcagcctcaacggcgaaaaacgcctgggcttcatggcccgtggcgtgcccggcgcccatgtggaaatcgcccgcctgttgcccaaccaattgcaacacctggtggatcagagcagcggcagctttgcccggccgaacttcggcaacgaatattttgatcgcatggtcgagcgtcaggcgttggatatcccgctgtcatccaatgacccggcgaaaaccgtctacgacaatgtcgacctcagccactacctcacggccaacggcggtcggcgcggcattttcgtgctcaagctcagcccgcaggacgacccggccacgcgcacgttcgagtacgaccgcagcagcaccagcgacctgcgcttcatcgtggtgacggacctgggcatcatcgccaagcgctccagcgatggcagccatgacgtgtacgtgcagtccatcggcaatggctcgccggtgtccgatgcacaagtggacatcatcggtcgcaacggtttgccggtaagcagtggccgcaccgacgccgaaggccatgcgcacttcgccaagctggatgaattgcgtcgtgagaaaacgccgctgatgtacgtggtcacgcgcggcaatgaccagtcgttcctaccgatcgcccgtcagtcccaacaattggatttgtcgcgtttcgacgtcggcggcctggaagaagacggtgcgattgatcgcctcagcgcctacctgtttaccgatcgcggcctgtaccggcccggcgaaaccgcgcacctgggcatgatcgtgcgcagcggcaactggaagggcatgctgcaaggcctgccggtggagctgcaaatcaccgacccgcgtgggctggaggtgattcgccagccgctgaagctgtccgccagtggctttgaaacctttgatttccccagcagcgaagtcgcccccgccggggagtacaccgcgaccttgcagttgattggccagaaacagacccgcaccgacctgggcagcgtgagcttcaaggtccgcgacttcgagccggaccgcatgaaggtcagcctgagcctgcatgacacgccggtgcagggctggattccaccggaccaagtggtggccaaggtcaccgccatgcacctgttcggcgccccggcgtccggccgacgcgtgacggcaaaaatgtccctgagcccaacgcttgcggcctttgatcgctacccggattaccgtttccgccttaacgatgccctggaagacgccacgaccgaagacctggccgaaaccaccgtcgacgacaacggccaggccgtgctcgacctcaacctgcagcgcttcgccaacagcacctatcgtttacaggtgatgacccaggtgttcgaggctgaaggcggtcgcaatgtggcggcgcaaagtgccttgctggtgtcgtccgcgccctacctggtgggtgtgaaaagtcaggattcgttgtcgtacgtcgccaaggatgcaccgcgccaagtgcaatggctggctgtcgcgccagacctgacaccgctggcggtggacggcctgaccagtgaagtggtcgagcaccgttatgtgtcggtgctggtgaaacagtccaacggcacctacaagtacgagtcacgcatcaagaacatcagccagcccgcgttaccgttgctgatgacgaaagaaggcgccaagcagaccctgaacacctcagcgccgggcgactttaccctgcaactcaaggacgccaacggcaacctgctgaaccagatcgactacagcgtggccggacgcggcaacacctcgcgctccctggaacgcaacgccgagttgcaactgcgcctggataaacgcagctacgccaccggcgacgagatcgctatcagcattcgtgccccgtacaccggcgccggcttgatcaccatcgagcgcgacaaggtctacacccaacagtggttcaaggccgacagcaccaacagcgtgcaacatatccgtgttcccgcagggcttgagggcaatgcctacgtcaacgtgcagtttgtgcgcgacatgggctcggccgaggtgtacatgagcccgctgtcctatggcgtggtgccgttcagcatcaacctggatgcgcggcgcatggccttgaaggtggaaggcccggcgaagatcgaaccggggcagacgctggatatcaaggtcaacaccgaccgcccgggccgggccgtggtgtacgccgtcgatgaaggcatcctgcaagtggcgcgctatcagacgccggatccgctgggcttcttcttccagaagcgtgcgctggaagtcggcaccagtcagatccttgacctgatcctgccggaattcagccgtttgctcagtggggcggcgccgggtggtgatacggaaggtgcgctggccaatcacctcaacccgttcaagcgtaaacatcagccgccagtggcctggtggtccgggctggtggacttgccggccggcgaaaccgtgctgcattaccaggtgccggacagcttcaacggcaagctgcacctgtttgcggtggccgtggacagtgacagcgtgggtgtgagcgaagccagtaccgacgtacgcgggcccatcgtgatcacgccgaacgtgccggcctttgtggcgccgggggatgtgttcaacgtcagcgccggggtgttcagcaacctcgacgcagcggcggacgtgaagtttgaagtgcagaccagcaacggtctggtggtgcagggtgacaagggcagcacgctgtctctgcaaccgcgcaaggaaggcacggccgagttcaagatcaaggtcggtgacaccctcggctcggcggatttgcgctttgtcgcggtattgccggatggcaagcgcattcaggtcgcggaaaccacctcgatccggccactgagcgaacatcgcgtcgccctgagcctgggccgcttcgacagcgccagcaaagagctgaaaccgacccgcgaactgttcagccaactgcgcgatgtgcaactgggtgtggctgcctcgccgctggtatgggctaacggcctcaagcactacctggacgactacggctatgcctgcaccgagcaactggtgtccaaggccatgccggcgttgatctggggcggcaatgcgcctgaagccgagcaagctttcggcagtgcggtacgcatgctgcgccagcgtcagaaccaggccggtggctttggcttgtgggcggccaaccccgatgtggcgccctacgctagcctctacgccaccgacttcctgatcgaagccaaggagcgcgggctgccagtgccggaagacctgctggtgcgctcgaacgcgtacctgacagacctggccaacggtcctagcgaaggcctgtcggaattgcgcaaccgcgcctacgccagttacctgctgagccgtcaggggattctggtgagtggtgcattgagcgatatccgcgaacgctacgaaagctacttcaaggacagctggcagaacgacctcggcgccgcttacctggctgccagctacaagctgctcaagcaggatcgccaggccgataccctgttccgcaagattccatggcgttcccttgtggataagtgggacagcgacggtttgtactacgacccgctggttcatgacgccgaacacctgcacctgttggcgcgacatttcccggagctgatggacgatgtgcctgcagcgctgctggataaactcggcaagcgcctcaacgagcagcgttacaactcactgtctgcggccctgctgctgcgtgccctggacaactacggccagcgtgcgcaaagcgacatgaccctcaaggccactgcctggctgggtgacaagcagcagcaattgctggaaatggccggtcagccaccgcgcgccgccgtgccgggcgccacgcaaaagctgttgatggaaaaatccgacggcccagcggcgttctacatgctcagcgaagccggtttcgacaagggcgccaagctcaagccgatcaacaatggcctggaaatcatccacgaatacctcgacctcaagggcgagccggtgagcaaggtcgcggtgggtgatgagttcctggtacgcctgcgcctgcgcgctaccgaccgcgatcaggtacaacaagtggccgtggtggacctgctgcctggcggtgtcgagcctgtgtataacttgccgccggagccggaagacgccagcacggaggaaagtgagggcgaagagtccgagtacgtggaagcagacaaccaggaagaacaaagctggcaagctcccatcggggaaaccgagctgagcaactggcagccggagtatgtggatgtgcgtgatgatcgcgtggtgttgtacggcaccgcattgcgcgatgtaggcaccttcgtctaccgcgtgcgcgccaccaacgccggcaccttcaacacgccaccggcctacgccgaaggcatgtacgaaaccaccctgcaagggcgcggcaaagtaggccagcttgaaattaccaagccttaaacgcctggcgccgccgctgcttgtagcggcggtggggctggtggggctgcggctttggccgcatgccccgctggaacacgcggtcacttcatcgcgggtggtgttggccgacgacggttcgctgttgcgcatgacgctggcggatgacggtcaataccgcctgtggctaccgctggagcggatctcgccgtcactggtcgaagccttgctgctcaaggaggaccgcaatttctactggcacccggggatcaatcccccggcgttgctgcgcgcggccacggccacctacagcggtggccagcgccagggcggctcgaccttgagcatgcaactggcccggcgcctgtgggacctgaacacgcgccaggtgccgggcaagttgcagcagatggcgctggcgctgtggctggaggcgcgctacagcaagcacgacatccttgaggcctacctgaacctggcgcccatgggcggcaatatcgaaggggccgaggcggcgagccgcatctacttcggcaagtcggcggcgcagttgtcgttgtccgaagcgctggcgctggcggtgattccgcagcagccggggcgtcgggcgcgcttcgggccgtcactgcaacatgcgcggctgcgcttgatggcggattggcgcgagacttatccacaggacccgcgtaacgacagcctgctcgatttgcctttggaagcgcgtaaccgccagcagatcccgttcctcgccccgcacttgagtgaacaactgctggcctcccaaaccggcaatgagctgaacagcaccctcaacctgccgttgcagcaattgctcgaacgcctgatcaccgggtttatcgccgagcggcgcagcacaggggtggaaaacgccacggccatcctgatcgacagccgcgaccagagtgtcaaggcactggtgggttcggcggattacttatccacaagcctgcacggtcaggtcaatggcgtgctgtcgcgacgctcgccggggtcgacgctcaagccgttcctttacggattggcgctggatcagggggtcatccaccccatgagcatccttaaagatttgcccagtaacttcggctacttccaaccggaaaatttcgacggcagttttgtcggcccactgacagcgcgagatgcgttgatccgtagtcgcaacattccggcggtgtggctcgccagccaggtcaaatcgccctcgttgtatggactgctgcaacgcgccggcatcaagggcctgcgcgacgagagtcactacggcctggccctggccctcggtggcggcgagatgagcccggaagaactggcgcggctgtatgtgatgctggccggtgacgggcacctgcggccgctgcgctatttgcaggaacagccgcagtccaccggtgcgccgttgctcacgccccaggccgccttcatggtgcgcgacatgctgcgccgtaatccacgcccggatggcctgcccggccgccattggcgcactgcctggaaaaccggcacctcctggggctttcacgatgcctggagtgccggcctggtcggcccttacgtgctagtggtgtgggtgggtaacttcgacggccgcccgaacccggcgtttatcggtgccaagaccgctgcgccgctgttcttccgcatcgccgacgccctgcccctggccttgcccaacaccgtcatcaagcccgacaaaccgcccgccgggctggtgcgcatcgacgtctgcgccgcgtccggcgaactgcccaaccgttggtgcccgcaaacccgcaagacctggtacatccccggcatctcgccgattcgcgtgtccaacctgcaccgcccggtgctgatcgacacccgcaccggcaaggccgcctgcccgccgttcgagccgcagtacacccgcgaagaagtcttcgaattctggccgagtgacgtgcaacgcctgtaccgcgcggccggcctgcctcggcgtacgccgcccagtgtgatgaagaactgccagcccaaccgcctgagtgaccagagtgaagcgccgcagatccgctcgccgctgacccaggtgagctaccagttgcgcttgtctcaaccccaggaaagcatcccgttgaatgccaacgcggccagcgatgcggcgacgctgtattggtttgctgatcaaaccttgatcggccagggttcgccgcaagccacactgaactggcggccgggcaagtcgggggagtatcggctgcgggtcagtgatgatcaggggcgcagtgcgagtcgggggttgaaggtggagtttgtgccgtgatcaggtatcttcgtcgccgaagctcgccttgcccacacgcttggcaaaatggttgtacgccgcagccagttttcgttgttcaaagatagaaaacaccagggtacccagcaggatcagcatccacaccagaaacagcttcagcgtatccacatgggccacgaacagtagcagggtcactacgccgccaatcaccatgcccagccccatccacgcccccaacacacgacccacggccatgcgtatgcctttgggcaggaccaatcgggtggtcatcattaccatgatgatcgccaggaagaagccaaacgcggccatgaacggaatctgaaaaccaccttcgcggtacaaccaggccagcaaacgatacagcgggccgagttctaccatctgttgataggtgtccggacgcggcaaatgcaactgggtaatctgctcgggtgtgagggccatgatgcccacgccgatcattcctgcgaaggcggcatagaacccgcccgcacgccacagcggcgccagcacgcggcggctttccacatcctcggtcagcgccacaccgaacacggccttggggtatttgccctgggcaatcacggtctggccgtcccgttcgcaggcatcaccgatcagcatcacatcgaggtcctggataaggaggatttcaccctggcgacgggagctgccgatcgactcgtaatcgtcgggcgacttgttgccgaacagatcgatgccctcggcaatcacagggatttcgccgctggcatcctgcaggcgaaagtcattgcagcacgcctcgctcttggaccggctccagctccagcgcccgtcgtcatccttctcgccgtcctcgataatccacacgtagccggcgcaaggcttgtgatgcaccggcgacaacaacggcttgtccaccattaccttgccacgcagctccaccaagcccatcgccagcgaacgaatctggctcgtcgccagccgctgctcggtcttgtagaagctcggaccaaagctggccaggaggcagatcagcaggaacatcgggaaaaacaacgcgacaaccgtcatcggggcgtagatcagcaaaccgataaagcccgcaagaatcaccagcgccagcacgattttccacttcggctttttcaccacggcgcctaccggcgtggtcttcatgcccctggcacctcaagcttcacaccttcgtagcgggtttcttcggcgctgatcgccagcaacgggatgcgctgataactgagcaaccgcgcaaagaacaggtcggggaacactgcaatggcaatgttgtagaggttgaccgactcattgaagaactcacgccggtcggcaatgcgctcctccaccgacgagatcgcctgttgcagcgcgaccatgttcggtcccgagatcaacgtgggatacccctccgccaccgcaatcaccgacttgatcgccgcgttgagctggttggaggcatcgaccttgtcgttgaggctgctggcattaaggtactgctggcgagcttcactcaagcgcgtgaacagggcgttctcgtggttcatagcggtttggaccacacgcatcaggtccgggatctgatcggcccgctgcttgagcagcacgtcgatgttggcaaaggccttatctacatcattacgccgcatcaccagcccgttgtagaaccccaccatccagcccaccaggccgacgccaatgatcagcacgacgacgccggcgataaggagttcgatgttcatggtgaaggcattccctggctgagttatccacagggtcgcattctaggggtaaaaccggatcgcgcggcgggcactggcccacagaaccgacaagaggtcgctaatgggagatgcctgccctaagtgccggggctcgcttcaagtaagtgcacgtcttgttggatcagcctctcaacgaccttgcatcagctcacggtagattgtgatgtagtcggtaaccatccgttcagctgtgaaatacttccaatagcgctcctctgctcgcagcccccaaatacgtgcgtcttcgggatgctcccaaaggtattgcatcgcgcctcgtaacgcggcagggtcgcccggtggcacaactagcccagtgtcaccggatatattgataaaggtggtaccggtacctatctcgcaggaaatcatcggctttccatacatagcaccttccaataaagatatgccgaaagcttccgagcgaaggtgcgaaggaaagaccacggcataactcagctccagcagcgccaatttgtcactgtcaggcaactggccgaagaaatgcacattatccagccccaaggcgcgagcctgtgccttgagttcatcctcgattggccccgcaccgacaatgactatggggaattcagtgcctcgggccgcttccatcaggatgtgcaggcctttgtaataacgcatcacaccgacgaacaggaagaatttttgccccaccttcgtgcgccaggccttgagcgtttccggatccgcctttggataggtctcacggtccaggccgatgggaatcactgaaaccttgtctcgatagcgtgccaagactgcgctggtggccaggtagttcggcgaggttgccacgatacggtcgacgtcgcgcaagaaccagcgtttcagaggtctgtagagtttcagcagctgtttctggcggatgatgtcggagtgataagtcaccagcgtgggttttttgattctggtgatgaaatgcaccacgtccatgaagggccatggaaagtggtagtgaataacgtcagccctgcgcgcgagttgataaaagcgcaagaacgccgagatcgaaaatccggttgaggcgatttgcagatccatcctggcgtgatgcaccaggtaccccccgacatcaaccgtgcgcggaacctgtttggacgtcaaagaaagtacgtctgtctgcacaccctgcttggctgcgcccagggcgatctggtggataacctgctcgattccgcccatcgaccagggcactgaggttttataaaagtgaagtactttcatgagctccgaataatcgccgccatgcgatctacaaaggtttttttcgagaatttttcagcctgtatctcgcacgcgcatcgcatggcaagtgctctcgcaggattcaggctgttgatcgcatcgcgcaaagattccacgtccaactccggctccagcaatagtccggtcacaccgtccactatagtctctatcaagccaccttcacgtacaccgatcacgggctttccagcagacatcgcttccacgggcgacataccgaaatcttcatccgtcggcacatagatcgctgcacgcgcaccaccaatacaggcacgtaaactggcttcgctttgccaaccggtaaagtggatgttggcagcgccatcggcgagttttcgcaacgccagctcgtcccgaccaccagacgcaattaccagcttctgatcaggcaactcgagaaaagccttgataatggtatcaacccgtttatgacattccagcctcgccagggaaatgaagtaatcgccctgctctgtccatcgaaaacgttcggtatccacaggtggatgaatcacctccgactccagtcccaagtgtagacgcaggcgtttgcgcacactttccgagttggtaattacacggtccatacgcgcaagtgctccctcgtaacgccgctgaaaggcatcaaaggcaaccgttgccaggggacgcagcggcggtgcaaagcgctgcaaataacgttcgcgccagtcgtagagatagcggggtggcgtgtgacagtaataaatacgtgtgccgctgagctggtgggtaaccgccaggggcgcatacaagccgctgtagatcaccgtctgagcgtcgcgcagaaagccggtgcgcagcgtgaagcacgccagtgcctcggccactcggggtagtgagcgggtagaagtcgaacccaggcaacgtagcccctctgcgcctagctcctgctctgcagccagataacgcgcttgttcaaaaactcgcgagaccaccagttggtagtcaggcagccccttggccaagtcaatggatagccgctctgctccaccgctgacctgcaaatagtcgtagagaatgtagttgctcatcgcttactcgacccacgaaaacaggggtgccagcctgttgggccaggaggccgattgcgcatagtgctgataacgaggctcctggcctgtttcatacagcgcagcacgcaccgccacaatgaactcgtccgtcgatgaacacagcacggccgggctcttcaggttttccaattctgcccaacggctggaaactaccggcaggccagccgccaggtactcatagagtttgagtggatgaatattcgcaatcagtgaactgcacgcttccaggtgaaaggggatcagtcccacatgggcatgtcgcaggtagctggccatttgttggtgaggccgcacaccaaggaaatgcacgttgatcgacatgttggtcggcgtattggcacaggggccgatcagcacgaaactgacgtccggcatcgcacgggcacaagcctccaccatagccaggtcaacccagctgctgatatcaccaacgaatacggcaatcgggcccgcaagtgcagcgtattcatcgggcagcggcggctccccggcgaagcgctcgcaatcaacgccattgggcaggtacattacctcccgcgcgccatgctctaacgcccactgtgacaagccttgcgaggcggtaaccaccagatcggcgcgcatcattgtgctcatttcgctctgtagagcgccggcaccataaccctcaaagccggcgttgtagtcagccaggcgcatgacgcagcgcttgtagcggatctcatccagccaggcgggctgatagatgctgtccagaaacagcaagtcgacctcgccgaaaccggcatcacgcacaacctgactcacgttgggccaactcagcttgttccagtgtgaaaacaaccagggcgagcgcagaaaacgacgattggagggtgctaacaacgagaacggaacgtagtgccaaagcttgccgtcaaggtcactctgcccgccagcccggtactcctgaagacgcgtctggaataccaatgagtttggacgtagaaagttgatgattgagataggtgcagccacataggcgacttcccagccctgctccacgaactgggtagcgatggcatgactgcccacgcgcatcggcgacgtccagcagtgaatgcctacatgcagaactcgcttaaccatgaagaggctccaacaaacgcatgctccagacacaacgcgcgggtacatcacgaacacggataacttgagtctccaccttgcagccataaccgggtgagtaggcccccttttccaccgcggcctgtccagcggagatctccagcctgacctgcctgccatcagagatcagtaaccagccctgctcatcgcgcagcactcttatctgcggggccagcgggaatgccaactcgcccgcaccggcgccatactcatcgacaacctcgaagccatcgtccaggtacgccacactgcgtcgatgcgtagcggcaaacccgtcatgctcgccgcagaaaccgtcttcggtggcccggatcacgcgggtgcgcgcgactcgtgacaggctgaacaaaccggtaataccctccagccaatcattctgctcgccggatccaacactcaacgtggcatgtgcccgattggagcggaatgcgttgcgctgatccggcagcgccgtatagccataggtacccggatcgagaatgaacggcacaccgtcaaagcagacctcaaacgacaactggtcattatgcgcatggccgccattccccaattgcccgacggagccgcagcgcaacgacaaccagagcctcggacggcgatagacatacagaccgaaattgtcgaacgcacacaacgcatcgagcgcggtctctggctcgccgccctgtccttgcccaagggggcctgccagcgcctgtaagagtagtgcgtccagtgaagccggtggaggtcttggccccttgcgcaactgcgccacgcaatcgataaacaccgcatgtccatccttccagggcgcatcgtgtaacgcatcgggagtgagcttgaagaagcgcccgctatcgttgtcaccaacctgagcgactccgccgtctggtcgggtgatcccacgggaaaaatcagccattctgaccaagtgccgcagggcctcttctgaatgcagcgcgtgagccgcaggcacactgcgctgagccggcagcacgcctgggcccgaggcatccaggccgtcgtcgaggatagcggagttcagagcctgaagccgcgccgccacgcggcgcgccaatatagcgggaaacagcacgagttcagccgacagccggtggtagctggttgaagcttcgaaattgctgccatccgcctggaactgcacgaacatttccttacccaactcattggccgccagcatcaaccacgcatcagtctctgcgctgggcggcaggtaggccgcaacaaacagcaaaccagccaagttggccaggtaatggttgctgcgcaggtgggggaaccattccaggtgggtgactatatgacgaccgtgggccagtacactgcgcttgaattcgatgtcgaagtccggcgcgaaacgcatgccggcggctataaaaatatcgtgggccagcagtaggttggcgatacgaattcccacgtccatggtgcaggaccagttgacaccgaagcggggcgggttgcacgcaatgaaatccagcacctgatcctgaaactctagacgtagacgctcactcgccgcctgatctgcagccaactggtgggccgctgctgccagggccagccgtggcaaatgttgcatacgcgccagctcccagggcagcttgacgtcgacgccaagaatgtggccgtagcgaattagcgccgaaggcgtaaccggcgaccagcggtagcctgaacgcaggtcaaggtgccagtcgatggactggtagccgggcgaaatcaaacgctgcaagcgtgtcgcatggcgacggttggctggattgcttccttggattgccggcatgtcatagcggtgcccttccagtccggccgcacggaatcctgcaacgggctgtatgtcccaagcgccgagcaggtcgaagcggtgctccagtaagcgctcgctgtcggcagtcagtactgcacgccaaggctccagcatttgcgcagtgataggtggcagcagcgcttgcagaggctgctcgggaacatcgccgccaaatgtaggcaaaaaacggtcccgcgcctgcagcctgacttgcgcccagttgcgcagcgcataggcagtgacgcgacgagcaatctgcgcaggcggatggcgcagcagtcggcgaatccgggttggccaactcataaacagatgcgctcaagtgcgcatacgatccgctgcgtatggtgacgccaagtatgtttttccagcacttcctggcgtgcacgctcacccagggagcggccaaagtcaggctgctccaacacgtgagccaagccctcggccaacgcagcagcatggcccggctccactaaccaggcgctgctgccatgctgcagaacctcctggatctgaccgagtgccgatgccacgataggtcgccccatagccatgtattcgaacagttttgtgggtgaaccgaagaatggtgtgccatcaggattgggcacatgaggcgcgaccaataaatcacaacaggccaggtaacgaggtgcgtccttctgcggcacctggccagtaaatacgcattgcgaaagaacgccaagtcgcttgcaggcttccagcgttgcagcatggcgggcacccttccccatcagcaacagacgcagattctcatagtgttgcggctggctcgccagcagcagggaaaaggcctcgaccagttcctcggtgccatgccaaggtccgaaggtgccgataaaaccgatcaccgtcttgccctcaagggccagggtccgacgaaggtccgacgcatcgatgtctggatgaaaagccgtcgcatccacgccattgggattgaccagaattcgctcaacgggcacgccacgcccaatcaggtcctggtgcaggacatcgctgaccaccacgatcagatcggcggcttccaggttgagctgctcaacttgctcggacagtttcaggcgcgccactggcttaccccagtgctggctgatccagacttcggaaccgttgtactctgtcaccagcggtacattcagctccagtgccagcttggcgcctgcatagttgttcaagctatagcgctggtagataaacgaggggcgttcggcacctactaccgcgcttacctcggcgctggcggagcggctgaacaacaacgctggcaactcacggaaatcccagaaagccggggcgggcaaaagaatgcgcacggtgaggcaaggatcgacaataggattacccacggtggcgaacaccaacggcacaacacctgtgacatcgcccaagttgttgaccactccggccatgtgcgtgacagagccacccacttgggtcgagaaccataggtcggttttcaggtacaggcacggagcaccgggtttcggcgatgcggcgctgcgacgctgcgcacagccccgtagatgggccaattcacggttcacttctgcgagctcgcggggcaggcgcagcgcctcgccgagcgtagcgaacgcctgacgcagcagtgcaaggaagcccactttcagctgccgctggtgcgggtcgacgatcatcacactaccgtggctaagcagacgcagaaccaccatcaccagcagcgggcgcgggcgtagcccaagatgcgcaagcgtcagtgtcaccgatgtgtaacgcagtaagtggcggcgcattcccgggccacgcacagtggcagcaaaatcagcgtgtgaccacgtttcgacgtcggcaggcagttgcatgccctctggaggcccgccgtcacagatcagcaagtgccttaccatatcagcgcccaccccgcgcgttcggtgtgtcgatccagcggtcgtaccagcctgccaggttgtacagcacccacagattggtgccgtagtcgccacggccactgcggtgtgcctcgaacaactcgcgaatatagccggggttgaaccagccacgcttgaacagcgcgcactggttgatctcgtactctacacgacgaccgaactcacccttgagccaataggccaccggtgcgccgaagcccactttggtacggtcgatgacgcggtcgggaatcagcccgcgcacggcatccttgaacagtgatttggtgcggccgccttccagcttccagtgagcaggcatggcgtaggcggactccaccatacggtggtcaagaaaagggacgcgtgcctcaatcgaatgcgccatggtcatcttgtctacccgcatcagcagcagctcgggcagtctatagctgagttccagttgggtcatgcgccgcaattgctcgatatccccagctggcagcatggccgctgccgcagccattaccacgttactgtcggccacacgcagcaggctgtcatccagtggtccggaactgccgccaaagtcgatagcactcttgttgagcaaggcgcttttctggatttcccagaaggtcgcagcccccccaaagaagcattctttgtcactactggcacgaatcaggaagtccagcccagaggcgtgggacaaaccatcacgtcctgcttgtctggccaaccagccagccccgtggcgcatggctctggggagcatgcgatagggttgccagaagcgccggtgcaatttcagatatcgcagataaccgctgtaaccggcaaacaattcatcagccccctcacccaccagcacggccttgacctgacccgcagccaacttggagacatgataaagcggcacgcagacccaatcagccaacggctcatcctggtgataaaggatgtcggcccaggagtcttcaaacatgttccgggtcactgatacttcgtggtgctcggcgccaaagtgacgggccatatcacgggcatactcgcgctcgtccatttccggaaatccgtcgtagccgaccgaaaaggaatgcaccttgccgctcgcgtgcgccgccatgccagccagcagcgaactggaatccacgccaccggacagcaaaacacccaccgggacatcagccgccatatgctcgaccacagaggcgtcgaagctcgcacggatgctgcgcaccgcttcatcgcgggtagccggcagtgaagggggattgagcattggatgccagtagcgcttgaactccatgcggccaccgtcgacaagctgcagatagcaacctgctggcagcttctggataccacgaaacatcgtcatgggtgctggcgtgaccatgccactcaggtagtggtacatggcaattggatctatgtcccgtaccacgtcgggcacctgcaggatcgccttgatttcggaggcgaacagcaggcgaccatcgctggcgtgcaggtaaagcggcttgatgccgaccctgtcacgccccagatacaggacgcgctgcaaattatcccaaagtgcgattgcgaacatgcctcgcaggcgctgaagcaacccttcccatccccacgcccggtaaccctgcaccagcacctcggtatccgaatgtgcagtacggaaccgatgacccgcgacttcgagttcatggcgcaacgctacgtggttatagatctcaccattaaaggcaacgaccacggattgctcagcatccgacatcggctgcgtagaggcgtcgtcgagatcgacaatcgacaatcgccggtgccccagacccaggcgccgtgacgcgtcgatccacaagccagccgcgtcaggcccacggtgactcaggctgtcgcgcatgctgatcactaacgcgtcggaaaccgatcccctcccttgcgcaacaaacactccgctgattccgcacatggctcaggttctcgaaaacagcatcagaagcaatcggttcgcccctcgatccaggattcatgccaaagcacggcattgagtaccgtccagagatggaagctgtagccaccgcccgtgcccatctggtgcttgagcatgtctcggaagtagccgttgtcgaagaagccttcgcgtaccagacgcgaacgttcgaatgcggccatgcagcggcgaccgaagtcttcctgcttgaaccacgcctccatgggggcgccgaagccctgttttttgcggtagatcatgtcgtgatcgaggtaaggctccgcggcttttttcagcacatgcttgccgacgccgttacgcagtttgtggtgtggatgcagggtgcgggcgaactcgatgatgtcgtgatccagatacggtgtacgggcctcgatggagtgcgccatggtcagtttatcgacgcgcatcagcagatgctcgggaaggcgcagtttcatttccaggtagggaatcttttgcagaacatccggctgcaacagtttgcccttgatctgcgacatgtagtgttctaccactgcatggctgtcggtgctgcgatgggagtcgggcaaaagaccctcaaccgggcagtcgatctgactggaaaaaatgtccatgtttggcgtgagctgatcgcgcataccgccccaccagcacaccgcgcccccccagaacagttcctgaccagcgcgcgcgcgcttctggatttctttgtcttcagtggtcaccgctggcagaagtgccctgggttgggagacgaatcgtcgccaccaaggcatcccgccgccgggcagcgccgggttatacatgttcatcgctttatcgcgataatggtcgcaccaccagtaacccaagaagttctcgtccgcaccctctcccacctggacgacggtggtgccgttgtcacgcaccagcttcgacaagaagtacaggggaatgcagacgttgtcagcaatgggctcgtcttgcaggcgcaccatctcaggcaggaaatcctgcgcgtcgcggtgattgatcagcatctcgtgatgctcggtacgataacgcgcagccacccgctgggcatacttgaactcgttggtctcctcttcaccttcataaccaatcgagaaggtcttgatcggatcgctgcgcagctcactcataagcgccacgttaaggctggagtccacaccaccggaaagcaggacgccaaagggtacatccgagaccatgcggcgctcgatggactggcgcagcaatgacgtcatctcggccacggcctgttcatccgtacgctcgataatgtccgcagcgctgggtatgcagtcccagtacttgtgcgccttggctttaccgttcgcatcgatagtcatcagatgcccagccggcagcttgaagatgcccttgaacaaggtcagcggtgctggcgtcacgataaaggtcaggtagtgtgagaacgcggtctgatccatctgcggcgatactgcgggatggccgaacaacgcacggatctccgaagcgaacagccactcgcccgaacgggtgcgggtaaagtacagcggtttcttgccggcgcgatcgcgagccagatgcagcacgggcgcattgggattacgcgcgtcatagacggcgaaggcgaacatgccgtgaagtttctgcacacagtcgatgccccacacctcgtaggcacgcaatagcacctcggtatcggagtgatcggtgcgccaaacgaacggccgaatcgcggaaatctcacggcgtaacgcggcatggttatagatctcgccgttgaagctcagcaccaccgtggcatcttcgttcgccatcggctgcgtggcggccgtggacagatcgatgatggacagccggcgatgccccagcacacaacgctcataccgctcccgccagatccctgcgccatctggaccccgatgcagcatgcgatcacgcatattgatcaacgtccggtcatcgcacacttttgactgcgggttgaaagcgcccgtgattccacacattcgattattctcagcgttcgttgtggttgatgtcgtcttgctggcggccaaaaagccttccaagccggcgggacaaccgataagccaggttgcggctgatccgctgcaacctggccaacagaatggcgtgctcatctgctgctgccaccagcctcaggttcagttgctgtgcatggtcagcttgttcggccagcgcggcatcgcgtcggctcacctcttcttccagatgcgccaggccctgacgcagttcgacgatctcgcgttcgcgctcagcggcatgggccatttcctggttgattacctcggccatccgactcaattgctcactgcgtcgcagcaattcctgctgcgactcttgctgcagttcggtagcccgcttttgttgctcttgcgcacgaagcatttcgaggctcagcgcctccgcggcgttgccagcctctgcctggaggcgctgcacgtgctggttcagctcgatcatttgcgcagccgttccggattgcgccatgggttcggcctgggccagcagttcagcacggcgctgttgtgccatggcgcgacgatggggttctaacgcggcaccatcgcctttacgacaagcaacgacaaagagaatcggtgccgtcagcgagaaacgctcgagcaacgaaaccgccgggcctatggagttgagcagtgcgcgcgccgtaaccggcaattgctgcgattcgccacgtccaaccagcaggtcggcagctccacggtgtcggccaagcatgtaggaagcgagctccggcaggctcatcccatattgcccatccatatgcaacaactcgaaaccgcaacgctccagcaggtgacgaacctgcgcagcgccaaagaggttgatatgtcccggcgtgtcgtagccaccatgcaccacgctacaatcaccgcgctgagcacgcagcagtggtgaatcgagattaggaatggtgaaggccagcacgccattatcggccagcaacgggtggcaactcagcagcatctgcgcaggatcgaccatatgctccagtgactcccagaagctgatcagatcgaagacccccgttggcatctgggtatcatgcagtacctgcagcccggcatcttggcagatcttcaggcattcacgcgaagactcaacgcccaagccatcgaagccgtgctcacgggcggcaatcagggagttgcccaggccgcagcccatgtccaggtagcgcagcccttgccgtgggttgaacagcacactcaggcgtgtgaaatagtcattgaagcgagccaagtcggcctgctggttttcggcagacatacgcttgtgaaaggagcgctggaggactttctccgcctgcgggcaagcctggaagaaccgctcgaacaggcgagcatcgaccttcagcgggacgtgccagcagccgcactggccacactcttcatagccataaccatcataggactgaaagatcagccgctgatcgtgctccgtgccacaggccggacagccgcggcgttccaactcgactatcagcgggcggccctcacggttccaccattgcacagcctcgccccagtcggactgactcatagtgctgaagggtgtcccgatggtcatctgcggagcgctggtatcatcgtcctgcagggtggtcaggacaacgatcaggcgggcaaggtcgccagccaagtcaccggcggtctggtcaatcgacattaagtagtccgcctcgtgaaattcattcgccaattgtctccgccacgcccgcgcgcgctgcgtaaatcagcagttcacgctgggtcgggtcagccagcatggcctggtagttttccaggtcggtacccatcagttcagtcaagccatagatgctgtaattgaaggcctgcgactcaagcacgctgaagttggaggcctgcagcatccactcgatctcgtcggcggtatattcgcggtgatgcccctcaaacggcaattcggtggcgaactggctctggatcggggggtggaccgactgcccacgtgccagtttctggcggttgtagatataggccaggttgggcgtgtcgagcaccagcaggccatcggcgacaagcgagcggtgcagatcacgcagcagcaggcgcggagtatgcggcacatgctcgatcacacccatgagtaccacggcgtcatagctgctatccggctggaagtccgcgaagttctgcacccgcacgccttgctcgatcagcaatcgctggttgtcatcgaagcaagcgccgtagctgtcgtacgagtccagcgcggtcacctggtatccagcctgtgccagcatcagcgagcagttgccgaaataggcaccgaagtccagtacccgtgcacctggtggaacgtgctggcgcagcatgcgcaaggcacgaaccatgcggatcgaactgaggttgatgtagttggaccagttaaagcctttcaggcctggggaatgggtttccagaaccgagtaatccttgccgccgatgcaggccatgacctgctgcgcggcatggtcggcaatggcaaactctgttgcgaaatcacgctgtaactcgtcggtaaaattcagcttcatgctttgacctcattgatgatcaggcggcggctctcatgcaccaacacgtccagcccaatccatcgttcatcacgggcgtcgataatgttgcgtgccagccactgcgggttctccgccgcaaggttcgccatctgaatgctcctgctgcagaagtcgaacaaccacaatttcaggatgttggcggccctggctacgctgactcctcgcaggttgaacgcgccgacacacgcatcggtagcagcgtgttggcgccagcgaacttaccgccattacctttgatgttgaattcaacacctcggttcaaagcgaaatagacatcatcattgatagagaagaagcggccatcattgtcctcgaagtaaccggggcgaaccgcgaaaagcgtcagggtaaaggtccccagtcccagcctcaagcgagaacagtcaaaactgacctctccttccccatcggcgatgctgatttcgcccgcgctaaggcgagcgacatcggtaaccccgtcgcggtggatcgcgatgaggaactcaaccggtagcggcccggtacccggctcgacccgatacttggcgcgcacacagatgggctcgccggcatcgaagacgaaccgactgtcaccctccgcgccgcacagttcgactccctcgagccaaatacggcctgaaccatgtacgtcggactgtggagccaactgggacggcggtgcctgcatttcgcttcgactagtcggccatgtggacagctccccgaggagttgggcggcaacaagttccagctcggcgcgcatcgcgcatttatccttgaaccagagctcgcacaacagcgtattgtcttcgctggcggagtagtcgacttcgactctcagcgcgccttcgccagcctgctgaatctgctgctggctcaggtccaacaccaatcggcagcgcttgaccgcaccaccgtccgccaggatacgcagcccgctgcgcccggctaccgactcaaaaccagaggacggctggataagcgtacaaccttcctgcatggggtactcattgagcacctgctcaccatcaagcacacgcaccgtgcgcaccagtagctgcccacgcaagggcgcctggtcggccgtagacaattccagaacacacaggccggcctggcgcgtagccaaggccttggcgcgcaaacgtgcttcttcctggaggcgtaccgagtgttcataggcgcggattacttcatcgctacgcccatccatcaacacgctgccgcggtccatccagatcatgcggttacacaatttggatgccgaatacacatcatgggacaccagcagcaccgtggtgccgctctcctcagtcatttcccggatgcgctcaaagctcttgttggcgaagtaggcatcgcctacgccaagaatctcgtcgagaaccagcagctcaggggaaattgcggtcgaggtggcgaacatcaagcgcgccatcatgccgctggaataggtcttgaccggctgatcgatatattcctcaagctcggagaaggtgatgatttcctcaaccttgtgattggctttatccccagtcacagccaggtgcgccaggtaggccagcgcattctcacgacctgtgaaatcgggatggaaccccgtaccgatctgcaacagggcatgtgctccctggctcacctcgaaaaggcccacagtaggttgcgtcacccccgtgatcagtcgcagcagcgtgctcttgcccgcgccattgcgcccgataaaggccactttttcacccttgcggatggtcaggttgacgtcgcggatagcccagtgctcttgataggctccctcacggcgtagcatcccaatcatgtcgaggaaccggtagtgcggcttcgcataaagcttgtacagcttggacaggccttcggcgtggatgattacatcactcatagtccaccagcatgttcttgaagcgtctgaagaaggcacagcccagggcgaaggtgaccacgcagatcagtgcgtaccagcccaacacctccagattcacaggatgattagccagcagcacggtgcggaaggcctctgtcatgtagtaaaccggattgaggtagatcatggcctggaagccacctggcaccatttccggcttgaagccgatgggcgagataaacatcagcagcagcaaactcaggttgacgaagttagcgacgtcgggcagcgcaaccaccactgccgagaggacgaatacacagcccagcaggaacaaaacctgtagagcgatgaccacgggcagcagcaggaagcgccagctcatgttttcgtcacccagcaccagcaacgccacgatcaggatgctgaccacttggccggtcaacgcgaccagtaccgtgcgcaccgggatcaggtcaaccggcagcatcacgttcttgaccagatgcatattctgccgcagggaaaccgctccgctgttgagcgcctcgctcatgccgatataaggcaccagcccggcaaaaacatagagcgtgtagtcgaactcgctgagccctgggaaacgcattttgaacactaccagatagacgaacaggtagatgctcagcaacaacagagggttgatcaccagccatgccttgccgaaggccgaccccgaatagcgcttcgccagttccacgcgggttacggctgagagcacctggcgataggcccacatcatcgataacacacgccccgccgagcgcccgattcgcagaatcatcgcttgaatccccggaacagaagctccaccacgggttttctcagaacccccaccatccgagcggccaagcgccgcacaggatgacgatctgactgttgattgttactcacatactggacaatgctggcgtccgccagggtccgatcgaagaatggcccctgataaccgtaagccatcgggcagcgctggcagggtggcaacggcgtgtcagagttcaccgtgcggcggaattcacgcattttctcgccgttccaaatcgactggaaatcctgctcgaagatattgcccagcgcgtaatgctcctggctcggcccggtggtgatgcagcacacatccatgcggccatcgacggtgaagttgttgatatcggtccacggcttctggcagtagaaacgtaccttttccgggacttgcttgaccttgatgagcttggctttagtcggcgtgaccgtctgagcggaggtcgcctgcggctctccggcgacggcttccatctcgatcagttccgtgccttcacgctcgcgatccggggtatcttccagagcatcgccccaatcaatacgagccttcatcccctcatcgccgcgggagaacagcaccacctgcaaacgatggttttcagcggtatcgatgatcaagtcctgcgcatggctgccgggaccgaagctgaactggtgcgtccacttctggaagtcctcgctgagtacaccgatggccaacttacctgtttcgacgtcaacctttaccgggaagaccaagcggctgccgggtgcgcaagggttggagtaggacttgatcagatagcgtccattgaggttcggtcccgccacgatatccagtaaatgaccttgccaacgggcccgcacaccggggctatcgatctgccagcggcgcggaaacggcaacttgaacgccttgcggataccgaccccgggacgcatgacgcgaatgaagtcgatgtcggctacaaagcccgccgcaccggagaacaccaaggaaacctggagttcttcatccgtctcgaaggtcagagcaacctcctgttcatcctcgccggcctggatcacctggctggtcagaacatgtccagaacccgtgagcaccgagactaaaagaggggtgccctcaagtttcacgctagcccggaacagcagttgctgaccaggctccacgggtatgagcgcgctgcgccacgtgtagtcgccctcgccgccctcggggcagcgcaacaccgcacggttgagattccaggagacactcatggccgaatcgccgatatgccaatcatctcgacgcggtgccagcaggcgcccctcaaaaccggggggcatgatcaccctgtccacggggtcaggccggaccgagcggaaggtggccgggtcaatgcggatgtcgcaggagttgcgcgtgtagggaatctggcgccgcggcacgtcttccaggtattcccgtgcggcatcaagtgcatcgttgacctgggattcatacggcacgatgtcgcgcaggtcttctactgctcccaggtctgccccgagctcagacaatggccgaatcatgatgacgttgacgcgcagatcgtattcggcgaattgcaggaactgctgcagttcgtgaacgttggtggcatgcaccacgaacgacacgaacaaactgggggtgtcgctccaggcacgctggtcgacaatggcgcgaatactgttggtgacgcgatcgaactccttgatcttcatcacttcgcggtgggtctgggcggtagctgcattgagcgagaaggtgattgactgcaagctcagcagatgggggatctgctccggctcgatcaaagcgccgttagtgatcaggtacgacgaagcacctttcttctgcagcgtgaccaacagggagttgaactctcggtacagggtcggctccccgttgccttccacgccatacatgtaggcggtattgagtgtcggcgcgataaagcgctggaccttatcgaatggcaactgcttcttgatgatgccggtgcgtttaatcgtcaccgaacagaactcgcagagggcgttgcattgcccggtcgggcatagcgcaaggtacatcggcaggctaagactctcttcgcgccccagacgcatctccatgccggccacaaaggcattgaacaaccgagagctcttacagcgtcggtggacaaagcgcttgagaggtccccagtgcggcaggtaggtatcgacgtcgagaatactgtcgtcggccacatagggcgccgccaggatttcgaggccacccagcgtgaatgtgctgcctcggggataagcaccgaagtaattgaccagtgccaggcgataactgtcctgggcagcgggtgcataggaaaatgccagacgatgttcacccgtctgttccactgcccgttggcgcagccagtggtcaggatcaccggcactgccctggttctcagacttgatcaacaccagagccaagggagcggcatgatcgacatcgacctgcagttcaaaggtgtagagctgtcctttatgcaactgaaactcggaggacagcaactgggtattgagcggaccttcgtcgcagacccagtagccttctccctgagcctccaaaggctgcgcacaaaggttttgccaggagacatccggggcgatctggggttcgataaatcccgtacgcttcttgcgcccggattcacgcccaacattttcggtcacttcgacgagaggaatagtcttcatacatagagtccttcaggctcagcgttccatagcgcatttgcgctttcgcgagcatgtacagaggaagggccgcttggcgcggtaccgacgaatatcgcgcggcacaaagtggatgactgcgccacaatggctacggtgcgcaaacgcaccccatagccacttgaataccaagcctcttcaacgctccagatcagtgaggggggtgcctcgaatacggcaccgccatcggcgtaactcagtaccgcccggttggcctccaccgtaacctgcacactggggtgaaccaggaaatgccagcgcaatagatggttttgcgcattgcccagacgatcctcgacgatcaacgcaccgctgtcggccaggcagacccggcgctcatgcaagagctccggggccaggcgctggtaggacgaatgacgcccgatgataccgatgctgccgtgaccttgtttgggcatatcccactcaggttcgccttgctgcacgaggcgaaacaatgctttgggatccatcccgtgctgttcctggccatccacttgtaccgtgttgtgatgggcggtggagcggaaccagtttcgtgcgtccgggtcctgggtataggtgtaactgcctccatcgacgaacagcggctgatcgccgatggcccattcgatggcgagctggtcgttatgtttgtggttaccgatgccgaaggtaccacacaccgagttgctcattgcgacatagtgaccggcctgacgcagcactgcaacgccggcctgctcgaacaacattaccggtgtgggagccggcagttccgtgattgccgtcgccggatcccaagggtcgcgccagaacagcgcctcggcctgcccggctgcgtccagaggtttatcggatgtccgacagccaagcacaaccgagcctgcggccagcaagtggtccatatgctcctgctcggcttcccaacggtcgtaggccgagaagatatgcgcgcggccattatcagcgtcaccgatctgcggcagccggccgctgtcctggcgcaaggcactgacgaaatgcagcgctttgaccaagcgctcgcgatactcgcaagagaacggctgcctgtgatgctgggacagagcataggccgacaagaacatctcggtcacaaggcgatggtagggcacgctcgactcaaagccgccaccgtcttccagcaattgcagacgcacctgctgctcaagccccgcctccgcgataccacgccacacgcagccggcatccagcccggggaagttcatggccaaccagtacaggccgaacaggttcgccaggccatggttggaaacgatgatgcgcccttccagggtgccgaactccaggttggccgtgatatgccggccgtgttgcaccaggcttttgaggaagtgtctccaccagcgccggtctagctcgcctgagttctggaaaaaggacaggcccgcttgccaactgaccaaacgcagggccacgtccatcgggcaggcccaatgaacgccgagacccggtttgttgcgcgcgataaagtctgcaatcgtgcgggcgtaacagcgtgcgtatttttcatcaccggtcagccagtacgcctggcccagtgccggaaaatgctggcaccgcgtaagctcccaaggcccctttacatcagccgtgccacggcgcatgacgaaaggcgaccagcgccattggctgaataccgcgccatagcgttcgccggaaatagggtcgcgattccaatcgatatggtgccctgctccgcgcttaccccggcgcatgtccactgtcccgctgcccagcaagtcgaactcgccgcgtaccagccggtcagcctgggcaacgatgcgctcggcctcaccgggtatagcccggagttgctgcaccaccgaatcacggtcggacggcaggaagttacgcctgccgaaatcaccgcgacgctgacgaataaggtaagcgtagaaaccctgccagccatttcggcgcagtattgcggtcatctcgccgtccgcaggttggcgtgagaacaggtaacgcccccactcccagcagcgctcttgaatagattcaagcccgtgcaaccaggctttcaaacgctcacggtggggtgcagcgaccaagcgcaggcgatgcaaaagcgtgcgacgggcgaaacgaattcctctgccgatcacgatgtcaccttcagtgcggccgaacgctgcacagcgtggtgcaggattttgtgtacatgcttcttccaggtgtaattgtcgagcagagcctgacgcgcattggcccccagtgtcgaccacaagtccgggcgagcagccaggccggccacggcattgacgaagtcttcggtgtcacccggcttgcacagtatcgcgcgctggccgtcgagctggtcgaggcgggcctctgccaggtcctgggtgtcgaacgacggggtaagcacatcgccgatctgctccagcctactggctacaatagccccgccgagcgccatgtactcgaacaacttagtgggcgagccgaagaacttgctgtcaaccatgtggcggttgtgcggcgagatcaggatatcgctacaggacagcagcctggcagcgtcggtctgcgcaactgtacccggcataaagactcgatcctggaggtggtgacgcttgatggcatcgtccaccagatgacgaaagtttccgtcaccgataagcaggaaacgcaggttcgggtcgcgctcacacaataggggcagtgcctcggccagaacatcgattccgtgccagccgccgaaggtgccgataaaaccgaccacgcagttatcgggttcccaaccgaggcccacgcgcatctcgtgcttgagcgggctgtcgatgggcgcgtagtgatcgggcgagcagccattggggttgaagaggatcttctctggcgggatgccttgctggatcaagccatccttgatcacctgcgaaatggccacgatggtcgtggcctgggcgaaagccgcctgctcggccttggcgaaggtcgtttccaactcataaccacgctcatcgaagctgcgcttcatggagatttcagagccgttgtactcgaggatgtagggaatccccagttcacggctcagtcgcgcgcctacgtagctgcccaggatggaccgctcgtagatgtaggccggtttcagttcggccattcggtcacgcagccatcggtagaaaaagcgcgaggccttcagtacgtcgatctcgttacaggtcgaggacggcgtatccattatcacctgctcgatgcccatcgtatcgagcaggtcgaaacggttggccataaagcacactaggttctcagtacattcggccaactcctgagccacatagcaggtgtgtccgtagctaccaccggcggtaatattgacccagtagtcggtgcgcaggtacacaccggtgccggggatcttgttgtctgcgctgggtacaccgctgacggccagtggataaggcgaggcctcggcgatctgccgttcgatctcagcactgatggacgactccgagtcgcccagcagacgcgccaggtccgcaggcatccactcgaccaaaacggcgctcacatccagcgatgaggggccgccctgagcattactgaacaccagggtcaaactctcggagccacctgggtcgatcacaaagcgctcggtgaagtgccctttggaaagggggtagttgccaagccaggtggactcgtcggcattcaggcagccgaccgccatggcaccggtcgtcagctcaccggaaatcgataacaccgccatctgacctggccgagccgcaatcaccctcgaacgcagttgataaccccagtcggaatcatcgctttccagatggaagccttcctctcgcagggtaaaggcacgggcagccagcgcgctccatccgaactgttgcaagcgctctatgcgggccacgcgcacggcgtgcagagcacgagaggcataacgccgcaggacgcgagccacacgtagcggcaactgtatgattggcagattgcgcacgactattattctcccgaaaacgccattttgtgagtcttgaataccttgaccagcgcttcccgcgtcatcggattggcaccgataaaccagatcacgccttttttaaacaaatccagccacatatcccagccccagtcttgctgcctgagcatcaagcgtacctggccgaccctgcagcacagttgccgcccgcccacaggctcgcagtacccgctcgcgtaatctctggagacaggcccatggccggaatctcctgcctgatgcgcgtcatcatctgcgtatcggcggtgcactgcggacaggacgtcaggcttatctcttcaatctggtaggcgtagggttgatcggcatagatgagtaattcgacgcgggagccggccgcaaccgtgatggataaggtgccatcgggcatgcggaagtaggtaggcacaccagtgtcgatggtcaaccgcccgctcacgggctgtttcccttgctggcgccccaccattcgcagtttttggggcccctgctgcgtggcatcgaccaccagccctagccccgcggggttgagattgccgctgatctgcagcattccacgatgcagcgtaaggccgggtgcctggtaaggctgcacaatcaaaccattgtcggggccgaagaactggtcgagggcaacctgcccatgctcatcaaacagggttgagcgcgtcactgccagcgttgccaggccgaccacagccaaggcaataatgcccggcagcagcggacgcagcggacgcagcggacgcaagtcaatagcgggcagtcgtggcatgcgccaagggccttcgagtactcccaagcgcgagcgcagacccagacacggcgactcgacccatgcccaggaggccgcggccaggataaaggcgaacagcaacgacgcccacgccatccacgcttcaccggtgataccagcactgtaaagcgccagcggcaacggcatatggaacagatagagaccgtaagacaggtcacgtccacgcatccatgtcgacaactgcggccaagagtgagcaaacgccagcacaaacccagccagcagcatggcacgcagcgcaatcactggatcaggaactcggtagtcgagcgtagtagcgccggttttcacgtagtaagcaaggttgatcgaagcaaacaccagcatccaccaagacgcgcgcccaacgaaaaaaaaccgcagccgctgccaatagttcgccaccgtggccccggccaggaacatccagaagtaaggtgctgggtttgaaaggagcatgccggtcaggttggaactgggatcgctgcgcagcattgggccaaacttcatagcggccgctaaggataaggcgaagcacagcacgataagcaaaggcgtcaaccgcaaacgcgccagagtcttggagaaaaccagcggcaccagtagatagaagcccaactcaaccggaattgtccacagcacatcgctggggtagccgttgtacaggccgtcccaggtaaaggggccgtagttggtgaccaggttggcccagaagttggagcctaaaaacatcgccgacagcagccacttccagaacatcggatccaccagcgtcgccagggcaaagccgccggtgcaggccatcagcacgatcaccaacagatactgcaaccacagcgctgggtaaatacgcagggcacgactaccgaaataggtcaacagcccgcgctgccgattgacataggagcgcgtgatcagaaatccgcttaccacgaagaataccggcactcccggaaagcacttgagcaacccctccacctcacgcggcaacggcacctgcagccaccaaaagatgtgtgaaaatgccacctgcaaggccgcgagtaagcggatcagatcgaagttattgcgctgctccttagcgtccatgcctgtcagtcgtccacctgaacgaccgcgagaccagtgagcagctcctcgacccgtagcgccacggcagtggtctcgacgatctcgtcgaagggaatcggagccgggcccccgcttgccagcgcttgcgccagcagcttcatctgcgtggcctggcctttatcggcctcggtagcagaccagagcacctcgccggtgctggccttgatcagttgcttgaagtcgtcaacgacataagcctcgccatcacagaacacttcgatacgctccttgggcagtccctgcttgggaccgagcgccgtatagaacagattacccatgctgccgtcggcatagccgatcgtggcgctgaagttgtcagaggccagataaggcagcccgcccgggttgatgccagtggcactgatcgacgtgacgggcgcaccggacagcgaacggaacacatcgtacatatggcaggcttcgccaatattacgtccgccaccctgctcagtctggatccagtggtccagcggaatatagccaccgttaaggcggtagttgatcgccaagggggccgtgcgcccggaaagagcttcacgcagggcctggagggctggcgaaaagcgacggttgaaacccaccataagcaacggtggatcgaccagggcgtcatggcactgcgtcagttcgtcaagttcgtcccaggtgatcgcaatcggtttctcgacgaacacatgtttgcccgccttgagccctgcaatggcctgagccgcatgttcgcaatggcgcgtggcgatcaccagcatatggacatcaggatcgtcgatggcagcgctcagattggaggagaagacgccgagccggcgttcgcgtacgaagttgccaccacgcaccgcatcgcggctgaccacaccgcgtagaaaaatattgtccagacggtcgagcatgggcaccaacatcgactggccatacgcgccagcgcctaccaacaggtagttgatcttgcccacctgcgggctgcgggcaccgcgcagttggatacgctcggcctcggcaggttccaccatggcaacatccgcccgggtgtaatcgagcagcacgccaataggcggttctagactgtttgccaaggtcttgtagagcgccggagcgtcacccaccggcgctacgatatccacaagcgattccacatccaggcgcctggctgcgatcagctccatgtagctctgcatattacgattgagcgtccagcgcacataagaaatagggtaatcgttgcccttttcctcataattcgcgtcataccgcccaggtccgtaggacgtgctcatcagcaggtcgatttccttgcgatagaaatgcgcacgctgcacgttgaggccaacatcaccgacgatgaccaccacaccgcgtcggcgagtgatctccatagcggtattgatcacgctgtcggacttggtcgccgcagtgatcaaggtgcggtcacaacccagcccggcagtgatgtcgcgaaccagacgagggaactccgcggcattcgaagtaccgtgctccatgcccagcccatgggcacgttgcacacgcttggggtcgagatcgaatccaatcacctgacaacccgcagcgcgcagcaattgcacggtcagcagaccgagcagacccagtccgaccaccgcgattttttcacccagatcaggctgggcgcgacgtacaccctgcattgcaatcgtgccgatggtggcagacgcagcccagcgcatatcgcagccatccggaaccaggcaaaccaaattgcgcggtaccaacacataatcggcatggttggcacgcccggcaccaccacaagcgacacggtcgccgaccttcagtccctgcacaccagcgccaagcgccaccacgacccccgccgccgagtagcccaggttccagccggtttcatccatttcattgtgcggatcaccccctgggttaggcgctaccaacactacatgcagccgttcgaaatcagccttggtaacgccgccttgggcattggagatcaccagcttagcggcctcctcgccctgtgggtcgaagatcaatcgatcatccagcgcgccgggcgtcagggtgcggttccccagccatttgttgccactctcgtcgaggataccaatggcaagcttgccgctgtcgatggaaccgcgaagctccactgcaacctgatagcccacaggaatccgaaagactgcggtgtgtgcctggtactgccagtcagaatcatccgtcaccagcgacaagcgcgcattgtcgataacaaactcgctggcagcatcacgctgccaagccaacgcacccaactcttgatccggaagacgcagcttgggcgactctgggatcagccgggcaatctgattcttggcgatacgtttgagccttgaggcagccaggcgagggtccgcgatggctttgaccagataacgaccagcacggctggtgatctcccgagcctgatccaggcctgtcgacgcctcgcttgaggctgccggacgcaggccggccacttcagtgcccacgctaatcattgaatactggacctgaaccaggaccgcgccgggctcaacgccaggtgcaggcatccgtgcaatgcgtacgcgatcacttgccaaaaggacttgcctcataactctctcttatcctgagcacctgcatgaacatattcactgataccgacactgcccaaggctattcatgccaagaccttcatatcagcatcaggactgcagttgcttttctatcgtcaaagcaagccgcgttgtcgcaagctggctcatgatgtttttttcgtccagcgccccggtattaatggcatccaccagcgccaagagctcttcatgctgacctttttgcggcgcaactgatgcccaatgctttgaactgtcgcccgccacggtgaccgcccggtaatcatccaggctcaaaaccttcccatccgtgtagatatccatgcgctctttcggatggctgggtgaacccagagaagtatataaaagggtggccacggacccgtcgctgtagcgaatggtcgcgctgaagttttcgttgcgtcgaatgccgccggcgctgccgccaatagcagtggcctctaccattaccggctcggcatctgtcagaaaggcaaacaggtcatagatatggcaggcctcaccgatgtttcgtcctcccccttcaggcccatgcacccaatgatccggcggcaggtaaccggcattcatccggtaggaaatcatcagcggcgcgacacgttctttcagcatcgctttaatacaggcaataccgggggcgtaacgacgattaaaacccgtcatcagcaacggctttggcccgacattggtaccgctgtagaacgcttcaacggcatccaactcttcttcatgcagcgccaagggtttctcaaccagcacgtgcttgccagcttccagcgcctccttgaccagcgctgcatgcagatgatgacgcgtggcaatcaacacgaggtccacatccgggtcggccagagcctcacggtaatcggtgccgacaaagctggcaccaaactgcatggccgcggcctttgcgctactaccagtgcggctgaccacccagcgtatctcataacgctcgcgcaatttgatcagattgggcagatgcacgccctgggcaaacccaccggcaccaatcacggcaacccgtaccatgccctggttagcgacgggcgggcgcagcatcaggctccgggtctgctccaaatgcccgtcattcgggtaacgcaacagggccaacagcggccgatcatttccttgaaccaggcgcacgtacagcgcctcggcgtccgccagatcgaccacctcaggaagcaacgcctgtaagtccaccgcgccctgtgccagcagctcaagaaaggccgccatattgcggttttccgtccagcgcacgtaggcctgcggatagtcctgaccaccttcttcgtagtgagggtcgtagcgccccggtccgtaggaggttgaaataaagaaatcgagttccttgcggtagaagtcttcgcgcttgatatccagtccgacatcgcccaccagcacaacacggcctttcttgcggcaagcacgcatggctaagctgatcagctcactactggcggaggccgccgtaacgaccaccgcgtccgcgccgaggccttcggtcatccaggtcacccgggcgacctgatcgtcctgagtgggattgatgcccagatccataccgcactgtctcgcaatatccagacggcgcacgtccggatcaaccccgataacacggcagccattggccttgaacagctgcaccgccagttgcccgagcacacccaatccaaccacgacgatagtctcaccgagcgtcggtgctgttctgcgcacaccttgcatggcaatagcgcctagagtcaccgtggcggcttgttggggagccagtccctgcggcaccagcacggccagattgaccgggacgttgatgatttctgcgtgattagcaataccagcaccggcgcaggcaacccgatcgccgaccttgaagccgtcgacctgctcgcccaccgcaaccaccaccccggcggccgaatagcccgtcggctgccccgccgccaaagtgccgcgtatctgcgcaacggtgcgcgaaagcccctgctcgcggaccatatcgaaggcacgcttgattttttcaggatgcttcaaagcgcgcttatacagcggctctgcggccgacaccacgctggcggcttctgtccccacacttacgcaggagaactctacgcgcacaagaatgtgccggctcccaaccaagggagcaggaacctcttccagtcgtgcagcaccctgccttagcagcagttgcttcaacgccaagctccccgggtatcgattatcaccttgccttcaagcaacgtgcgatcaatggtcaggaactgcttgtggttgaccagcagcagaacgatgtctgcatcagcgatggcatcttcggcctgcataaactcgacgttgcggtacttgctcagcgccgccggcaacgactcgacatggggttcgacaacgcagataaggccatcgatctcatgggccagatgggcagcaatttccaacgcagggctttctcgcaggtcatcaatgtccggtttgaaagacaacccgaggcaggcgaccttgggattgaccaagtccttggcagccgccttgacttgctctatcacccagcgcggcttgccgtcgttgaccaagcgcgccgtacggataagctttgcaaggtctggcgtctgctcgacgataaaccaggggtccaccgcaatgcagtgcccgcctacaccggggccaggctggagaatgttaacccgtggatggcagttggctaattcgatcagttcccacacatcgatgcgctgccgatcacaaatcaacgacagttcgttggcaaaggcgatattgacgtcacgaaaggcattttcagtcagcttaaccatttcagcggtgcgtgcactggtggtcaggcaattgccttcgacgaagatccggtaaaaggcggcagcctgctccgcgcacttgggcgtcatgccgccgatgatgcggtcattgctcaccagctcatgaatgatccgacccggcagaacgcgctcggggcagtaggcgaggcggatatccgacttctcactcgcatcgcagggaaaactcaggtccggccgcctagcccgcagccactgctctagcttctcggtcgtacccactggcgacgtggactccagaatcaccaaatcgccttttttcaggactggcgcgatatttttcgcggccgcttcgatatagctgaggtcggcctggtaatcatccttgaacggtgtaggcaccgccaccataaatatgtcggcagattccggttgcagcgaggcgcggaagcgtcccgacgccaccgcaccggaaagcagcacatccagttctgcctcaacgatatgaatcttgcccgagttcaatgtcgccacaacggacggattgacatcgacgcccagaacctcacatccacgactggcaataagggccgccgttggcaacccgatgtaccccagtcctatcattgacacacgcttgtattggatcatcccaatattccctgcacgatccgcttggcggccaagccgtccccataagggtttccggcattagccatggtttggtactcagtttcgctatcgagcaggcgcaacgtctcgaatacgatttttccggtatccgtgccaaccagccggacagccccgacatccagcccctcagggcgctcagtggtgtcgcgcatcagcagcaccggcttgccgagcgagggtgcctcctcctggatgccgcccgagtcagtgagaatcaggtggcagcgcttcatcagatagacaaagggcaggtagtccagtggcgcaattagatgtacacgtgggcagtcgccgaggatacggccgaccggctcttgcacattcgggttaaggtgtactggatagaccacttccacatcattctggccagccagctcgcgcagtgctaagcaaatgttctcgaacccttggccgaagctttcgcggcgatggccggtgaccaggatcaacttgcgaccagcgtcgagaaaactgaattgctcctcgaactgcttggtcagagcatcgtccatctcaatgcgctgcacgacgtcgagcaaggcgtcgactacagtattaccggtgacgcatatgctggtatcggcaatgccttcgcgcagaaggttagctcgcgccgcctcggtgggggcgaaatgatgtatggcaattgtgctggtcaaacgccggttgatttcctcgggccacggagaatatatgtttcccgtacgcaggcccgcctctacatgacccactgggacacgctggtaataagctgccagactgacggcaaaggtagtggcggtatcaccatgcaccaaaacaagatcaggcttctcagcttcgagtaccggcccgatgccatgcatgattcgcgtggtgatatcggtcaagctctgccctggacgcatgatgtcgaggtcgtgatctggcactataccgaacacacccaatacttgatccagcatctctcgttgctgggcagtgacgcacacgcgacagtcgatcaaggcctcttcctgaagccgctttacgacaggagccattttgatggcttctggtcgtgtgccaaaaacacacagtatcttcatccccccaaaatccttctgaagtttgaaaaagcggtggatatcccgcccatttgcgttatttcttctaacccgtatgacgggagaagcggactcaactacagataagcatattactgaatagtcgcgtcttttctatgaaaaatatcaaaatacttaaaaacttcatgaaacacccctctcacacgagccgaacggttaagccccgatgaaaaaatgtcccacgccgatgcctagcatgcccgcgaacgttagcagacctgcctcgtacacatccgatcgacttgggccagttcactatctgaatagctttgagcacccgaaaattggagatggtcgtccagcgtacctgttgatgcccatgttgcgggttcaactgatgcagaactgtttcggttgcagcgagccaacgatggaaaaagcagtcaaagaaaccaccactctatactagaagagttgtccgggctgcacttggatcgtattccagacggaacgatcattcccattttccggcgcttgttggaaacacacaagttttagagcggacctgacaattaatcaatggccatctggacgaccgaagctttctgctttaccaaggcacgacggttaatgtaataatcattaattcaattaattcaattaattcaaaaaaacaagaaaaagaacacactccccagcaatacaaccttactgtaggatacgctttatttgtatttttatagaaacttaaccattgaaaaatacttttaaaaacagattaaaacataaactattgacgattgtataaatcctcaaatcgaacgatatcatcttcacccaaataagagccagattgcacttcaatgatttcaagaggaatgacaccagggttttccagcgtatgagtttgccctactggaatataagttgattgattctccgtcaccaagtaggttttatcaccattagtgactttcgccgtaccactgaccacgacccaatgctcagctcgatgatgatgcatttgcaatgacagttttgcgccagaattaacagtaattctttttacttgataacgtctgccgctatgaatcgaatcgtagaccccccaagggcgacagacttctctattatcaacagattcgccacggccatcgtcttttagtttatcgacgattttccttacattctgcacctgacttttatgcgcaaccagaactgcatctttagtttccacaattaccaggtcgtttacccctaacgtgctgaccaaacggctttgtgagtagacaaatgtattatttgtctgctcaatcaaaacatcgccatgacaaacatttcccagaatatctttatctccaatctcccatagcgacgcccaagacccgatgtcgctccatcctgcgtcaagagtaactacaactgcatcaacggttttctccataatcgcacaatcgatagactctgcagagcaacttgcaaaagcttcacgtccaacacgagtaaaatgcatatcctgctcactgtctgcgagtgcgctacggcaagatgccaagatatctgggcgaaatttctccaactcttccagataacggcttgcacggaacataaatataccgctattccatagataattaccgctcgcaaaataggaacatgcagtttcttcatccggcttttctacaaatcgggccacgttgaaggtgtccacactcagactatcacccctctcgatgtatccgtagcctgtttctgcctgcgtcggaacaactccaaaagtaacgagttttccatcaagtgccaatggcaatgcctttcgtatagccgaatggaacgcagcagtattttttatcaggtggtccgcggccagaatgagcaataccggctcctgctcttcacgagaggcctgcagagcagccaaggccactgcgggagctgtgttgcggcccactggctcaagcaaaatattggtatttcccaacccgagacgcctaagttgctccgcggcgagaaagcgatgctcttcgttgcagataaggcgcggtgatgctaagtcaagaccatccagacgcttgatagtcgcctgtagcatggataactctccatcggccaggcaaagaaactgcttaggattgagctgacgagaaagcggccaaaggcgagagccagaacctccagccataattacaggtattaacatttaatcgtcccttgaattcaatgcgttttcgaactggctaaaggctatatagcgataccaccttttttgccaccgactcataattttagaaacttccttcattcacctgcccactcatatcagaacagtaacccgcagaaagctttctgtgcagcttgcccatagcctctttcaaagagtccgtatcaatacgaaaaagtagattacctagtctccgcagacctgagcataaaccggatcctggcagattattggacaccacgaatactaccttcataaacgaaagccccatccggccaagcagtcagagcacagcaacacaggttcgcattgttagcctgaagtgcacgccgccgtcaattttggcgagcggctgcgcatcgatatctcgatgcccgatccgccgcaggcgttttggtagacatatagtggccgttcaacttggccgattggatccaactcttcagagccgccgcactttgaatcgcccggatcctctaggcagcttgcaagctcattcagcgagatcgcaagccaaaatcgaacatatgatggaagcaatgaaaaagaaaaggcccctgaaatcaggggccttaggcagtcagtgtgtcaaactctattgcctgaaaccacgtcgagcctccaggatacggcgcattactccaccgtcaccgacttcgccaggttacgcggctggtccacatcggtgcctttaagcacggccacgtagtacgacagcaattgaagcgggatggtgtagagaatcggcgacagggtgtcgtggatatgcggcatgttgatgacatgggtgccttcaccgttggtcatgccggctttttcgtcggcgaacaccaccagttggccgccacgggcgcggacttcctgcaggttggacttgagcttctccagcagttcgttgttcggcgccacggtgaccacgggcatgtcgtcatccaccagggccaatgggccgtgtttgagttcgccggccgggtaggcttcggcgtggatgtacgagatttccttgagcttgagcgagccctccatcgccaccgggtattgcgcaccacggccgaggaacagggtgtggttcttgtcggcgaacagttcggcgactttttccacggtgctgtccatggccagggcttcgcccaggcgggtcggcagacggcgcagttcttcgaccagggtggcttcgacgccttcggcgagggtgccgcgaacctggccaagggacagggtcagcaacagcaggccaaccagctgggtggtgaaggctttggtggacgccacgccgatttcgcgaccggcctgggtcagcagggtcaggtcggactcacgcaccagcgaactgatgctgacgttgcagatggccaggctggcgaggaagcccagttctttggcgttgcgcagcgcggccagggtgtcggcggtttcaccggactgggagatagtcacgaacagtgtgtcgggctgcaccaccactttgcgatagcggaactcgctggcgacttccacctgacaggggatgccagccagttcttcgagccagtaacgtgcaaccatgccggcgtggtagctggtgccgcaggcgacgatctgcacgttgcgcactttggcgaacaattcggcagcttgtgggccgaaggcgttgaccagcacctggttctggctcaggcgaccttcgagggtacgctgcaccacggaaggctgttcgtggatttccttgagcatgaagtggcggtattcacccttgtcggcggcttcggcaccgtcgcggtattgcacggcttcgcgctcgacggattgaccgttgacgtcccagatctgcacgctttcacggcggatgtcagcaatatcgccttcttccaggtacatgaagcggtcggtgacctggcgcagggccagttggtcggaggcgaggaagttctcgcccaggcccaggccgatcaccaacgggctgccactgcgggcggcaaccacgcggtcgggctggctggcgctgaccacggccaggccataggcgccgtgcagttccttgaccgtggctttgagcgcaacagtcaggtcgcccaggtctttgagcttgtggttgagcaggtgggcgatgacttcggtgtcggtgtccgaggtaaatacgtagcccaggcccttgagttgttcgcgcaatacttcgtggttttcgatgatgccgttgtgcaccaccgcgagatcgccggagaagtgtgggtgggcgttgcgctcgcacggcgcaccgtgggtggcccaacgggtgtgggcaatccctaagcgccctaccagcggctcgccggcaagggcctgctccaactcgctgaccttacccgggcggcgcatgcgctcaagcttgccggcgttagtgaaaacggccacaccggcgctgtcgtagccccggtattccaggcgcttgaggccttcaagcaggatgggggtgatgttgcgttcagcgactgcgcctacgatgccacacatggtgtttctcctagatgattgccgcgcatatcagcgtaatgccgcgggcttggatctggtcgcgggcctcgagcggcaggcgatcatcggtgataagggtatggacgctgctccagggcagttccaggttgggaatcttgcggccgatcttgtcggattcgaccatcaccaccacttcccgggcgacctcggccatgacgcggctcagccccagcagttcgttgaaagtggtggtgccgcgctccaggtcgatgccatcggcaccaatgaagagctggtcgaaatcgtaggagcgcagcacttgctcggcgacctggccctggaacgagtccgaatgcgggtcccaggtgccgccggtcatcagcagcaccggctcgtgttccagttcgctcaaggcgctggccacatgcagggaattggtcatcaccaccagcccgggctggtggcccagttcgggaatcatcgcggcagtggtgctgccgctgtcgatgatgatgcgggcgtgctcgcgcaggcgcatcacggcggcacgggcgatggcgcgcttgtacaccgagacgggttgagtggcgtcgcccaccagttcctggggcatggtgatggcgccaccgtagcgacgcagcagcaggccgttgctctccagggcagccaggtctttacggatcgtaacttccgacgtttcgaaacgcttggccaactcgtccacgctgacttcgccctgttcattgagcaaggtcaggatgttgtggcgccgttggggtgtatttcgtttcgacatggtgatggtaagtttcgtttcgaaagataacgaaggcaatcaaaacctattggcgaaagatcgtcaagcgggacgcagcaaatttttatgcgacacagagcaagtgtgggagggggcttccccccgattgaggtctatcagctacaaagatgttggctaatagtctgcaatcgggggcaagccccctcccacattgaataccttccgctgaggaggctgtggataactcaggtctttttgattttgaccggacgtttccaaccgtcgatgttgcgctggcgggcacgggcgacagccagttgagacttatccacatcctggttgatggttgagccggctgcagtgctggcgccatcgtcgagggtaaccggggccaccaacgaattattcgaaccgataaacacgtccgccccaatggtggtctggtgcttgttggcgccatcgtagttacacgtgatggtgccggcgccgatgttggtgcgcgcacctacggtggcgtcacccaagtaggtcaggtggccgactttggcttcggcgtccaacttggcatttttcagttcaacaaagttacccacatgagccttggctcccagcacgctacccggacgcaaccgcgcaaacgggcccgcatcactgccctcgcccatcacggcaccatcgatatggctgttggccttgatcaccacgcccttgcgcaaggtgctgtccttgatcacgcagttcgggccgatcaccacgtcatcttcgatgaccacacggccttcgaggatcacgttgatgtcgatcagcacgtcgcggcccacgatgacctcaccgcgtacatcgaagcgtgccgggtcgcgcagggtcacgccctgggccatcaggcggcggccttcgcgcagttggtaatgacgttcaagctctgcaagctgcttgcggtcgtttgcaccctgcacttccatcgggtcgtggggttgctcggtggcgaccagcaggccatcactcacagccatctcaatgacgtcagtgaggtagtactcgccctgggcgttgttgttggacagacgactcatccagtcggcgagcttattggcagggaccgcgagaatgccggtattgccttcggtaatggcgcgctgggcttcgctggcatccttgtgctcaacaatggccgcgaccttgccatcggcgttgcgcacaatgcgcccgtagccggtggggtcgtccagctcaacggtcagcaggcccatctggcctgggactacatgcttgagcaggcgttgcagcgtttcgacttcgatcagcggcacgtcgccgtagaggatcagcacagtatccgcggtgataaacggcacggcctgcgcggtggcgtggccggtaccgagttgtttgtcttgaagaacgaaattcaagtcgtctgcggcgagacgttcacgcaccgcatcggcaccgtgaccgatcaccacgtgaatgcgctgggggtcgagctgtcgggcgctgtggataacatgacccagcatggaattgccggcaaccgggtgcagcaccttgggcagggccgaacgcatgcgggtgccctggcctgcggcgagaatgacgatttcaagagacatgagtggctaccaatcctgggcggtccggcttcagaccagagaagtgttttgcaaaaaaagaaaaagggtagccgaggctaccctttttaatcaatcgcgcatgaaacaagaaggcgtggccgcttacttcttgcgcaactgctggagcgtgcgcagctgggctgcagcctcggccaaacgtacagcagcagcgctgtagtcgaagtccgcacccttttcgttcagggccttctcggcagccttgacggcttcctgagcggaggcttcatccaggtcgccagcacgttgcacggtgtcggcaagtaccttgaccatgttcggctgaacctcgaggaaaccaccagagatgtaaaacacctccttttccccgccctgcttggtcagcgtgatcggacctggcttcaagctggtgatcaacggcgcgtgacccatggcaataccaaggtcaccgagttcgccgtgtgcaatcaccatctctaccagaccggagaagatttccccttccgcgctgacgatatcgcaatggactgtcatagccatctgattgcctcaacctgatgagcgcccgtttccgggcgcctggattacagtttcttggctttctcgatcgcttcttcgatgccgccgaccatgtagaacgcttgttctggcaggtggtcgtagtcaccgttgaggatgcctttgaagccagcaatggtgtctttcagggaaacgtatttacccgatgcaccggtgaagacttcagccacgaagaacggctgcgacaagaagcgctggatcttacgagcgcgggataccaactgcttgtcggtttccgacagctcgtccatacccaggatcgcaatgatgtccttcagttctttgtaacgctgcagcacgtactgaacgccgcgagcggtgtcgtagtgctcctggccgatcacgttcgggtccagctggcgcgaagtcgagtcgagtggatcgaccgctgggtagatacccagggaagcgatgtcacgggacagtacgacggtggcgtccaagtgggcgaaggtggtcgctggcgacgggtcggtcaagtcatccgcaggtacgtataccgcttggatcgaagtgatcgaaccttccttggtcgaagtgatacgttcttgcagaacgcccatctcttcagccagggtcggctggtaacctactgcagaaggcatacggcccagcagtgcggatacttcggtaccggccagggtgtaacggtagatgttgtcgacgaacagcagaacgtcgttaccttcgtcacggaacttctcggccatggtcaggccagtcagtgctacgcgcagacggtttcccggcggctcgttcatctgaccgtaaaccagtgccactttgtccagaacgttggagtccttcatctcgtggtagaagtcattaccctcacgagtacgctcacccacaccggcgaacacggaataaccgctgtgctcgatggcgatgttacggatcagttccatcatgtttacggtcttgcctacaccggcaccaccgaacagaccgactttaccgcccttggcgaacgggcaaaccaggtcgataaccttgatgccggtttccagcaggtcgttgccgccagcttgttcggcgaacgaaggtgctggacggtgaatgccccagcgctcttcggtgtcgatcgggccagcttcgtcaatcgggttgcccagtacgtccatgatccggcccagggtcgctttaccgaccggtacggagatggcagcgccagtgtcgacaacgtccagaccgcgcttcaagccttcggtggaacccatcgcaatggtacgaactacgccgtcgcccagctgctgctgaacttccagagtagtttccgcgccttgtactttcagcgcgttgtagatgctcggtacgctgtcgcgtggaaattccacgtcgataacggcgccgatgatttgaacgatacgtccgctactcatagctggatcctctgaatatttgaaccgttaaaccgcggcagcgccgccgacgatttccgagatctcttgggtgatcgcagcctgacgcgccttgttgtagatcagctgcaaatcgctgatcagatcaccggcgttatcggtagcgtttttcatcgcgatcatccgcgccgcttgttcagctgcgttgttctcgaccaccgcctggtacacctgcgactccacgtagcgcaccatcaagccgtcaagcagctctttggcgtctggttcgtagaggtagtcccagtggtgcttgagttcctgatccggggtcgccaccagtggaatcaactgctccacggttggctgctgggtcatggtgttgatgaacttgttggataccacggacaggcggtcaatccggccttccaggtacgcatccagcatcaccttcacactgccgatcaaatcattgatcgacggctcttcacccaggtggctgatagctgcaacgacgttaccgccgaagttgcggaaaaaggccgcacccttgctaccaacgacacacagatcgatctcgacgccgttttcgcggtttaccgccatgtccttgaccagggccttgaacaggttggtattcagaccaccgcacaaaccacggtcactgctcacaaccacataacccacacgcttgactgcgcggtcgatcatgaacgggtggcggtattccgggttggcgttggccagatgcccaattacctggcggatacgctccgcataaggacggctagcagccatgcgcatttgtgccttgcgcattttgctgaccgccactttttccatggcgctggtaattttttgcgtgcttttgatgctcgcaatcttactgcgaatctcttttgcgcctgccatgtaacacctatcaggttagcaagcgggagccttgcggctcccgctgcggcttaccaggtttgggtggccttgaacttctcgataccggctttcatgccagcgtcgatatcgtcattgaagtcacccttcacgttgatcttcgccatcaattcggcgtgatcgcggttgaagtaagcaatcagcgcttgttcaaagctgccgaccttggcgatttcaacgtcggtcaggaacccacgctcagcggcatacagcgacaacgccatgtcagcgatcgacattggggcgtattgcttctgcttcatcagctcggtaacgcgctgaccatgctcaagttgcttacgggtcgcttcgtccaggtcagaagcgaactgggcaaatgccgccagttcacggtactgagccagagcggtacggataccaccggacagcttcttgatgatcttggtctgagcggcaccacccacacgggataccgaaacaccggcgttcactgcggggcggatgcccgagttgaacatggccgattccaggaagatctgaccgtcggtgatggaaatcacgttggtcggaacgaacgcggaaacgtcgccagcctgggtttcgatgatcggcagtgcggtcagggaaccggttttgccggtcactgcgccgttggtgaacttctctacgtactcttccgaaacgcgggatgcgcgctccagcagacgggagtggagatagaacacgtcgcctgggtaagcttcacggcctggtggacggcgcagcagcagggaaatctggcggtaagccactgcttgcttggacagatcgtcataaacgatcagcgcgtcttcaccgcggtcgcggaagaattcacccatggtgcaaccggagtacggtgccaggaattgcagcgcaggagactccgaagcactggcagccacgatgatcgtgttggccagggcaccgttttcttccagcttgcgaaccacgttggcgatggtcgattgcttctgaccgatagcgacgtagacgcagaaaatgccgctgttcttctggttgatgatcgcgtcgatcgccagagcggttttaccgatctgacggtcaccgatgatcagctcacgctggccacggccgactgggatcatggcatcgacagccttgtagccagtctgtacaggctggtctaccgacttacgccagatcacgcctggagcaactttctcgaccgcgtcggtctcggtgttgcccagtggacctttaccgtcaacagggttacccagtgcgtcgactacgcgacccagcagttccttaccaaccggaacttccaggatgcggcctgtgcacttggcgctcatgccttcagccagactggtgtacgcgcccaatacaacggcacctacggagtcttgctccaggttgagggccataccgtagacgccgcccggaaactcgatcatctcgccgtacatgacgtcggccagaccgtgaatccgcacgatgccgtcagatacgctgacgacagtgccttcgttacgggcttgggaggtcacatcgagcttgtcgatgcggcccttgataatttcacttatttcggaaggattgagttgctgcattgctctgctgccccttcaaactcaagatttcaatgcttcggcaagtttcgcgatttttccgcgaatcgagccatcgataaccaggtcgccggcacggataacaacaccaccaatcagggatgcgtcctccgaagcttgcaggcgcacttcccgattgagtcgtgcactgagaaccttggcgagtttgtcttgctgttcttggttcaatgcgaaagcactggtcacttcaacgtctaccgatttctctgcttcggccttgtacaagtcgaacagagcggcaatctccggcaacagcgggagacggtcgttttcggcaacgacgtgaatgaagttctgcactttcacatcaaacttgtcgccgcacacttcaataaaagtggcggccttgtctgcgctcgtcaggcgcggggccttgagcacgcgctgcatggtgtcgtcttgcgacactgctgcagccaggccgagcatggctgaccaagaggccagctgctggtgggcctgggcgtgctcgaaggctgccttagcgtaaggtcgggccaacgtggtcagttctgccatgatcgccctcgcttaaatttcagcagccagtttgttaaccagctccgcgtgcgcgttttgatcgattgtggcaccgaggatcttctcagcaccgccgaccgccagagcacccagttgggcacgcagcgcgtctttgacgccgttcagttcctgttcgatctcggcatgagccgaagccttcacacggtcagcttcgacgcgggctttttcaacagcctcttcgacgatctggttaccgcgtttcttggcttgctcaatgatttcagctgcctgtgccttagcatcgcgcagttggtgacccgctttctcttgggccaactccaggtcgcgagctgcacgggtggcagcgtccaagccatcagcgatcttcttctgacgttcgtgcaaagccgcgatgaccggaggccacacgaacttcatgcaaaacactacaaaaatgaagaacgcaacggattggccaatcagggttgcattaatgttcacgccaacacctcgctcattcgttgtccatcactccaatcaactcgaaaattcgagtgattagccagcgagttgaccaacgaaggggttcgcgaaggtgaagaacagagcgataccaacgccgatcatggtcacggcgtcgagcaggccggcgacgatgaacattttaacttgcagcattgggaccatttctggctgacgcgctgcgccttccaggaatttgccgcccagcaggccgaaaccaatggcagtacccagggcgcccaggccgatcaacagtgcaacagcgatagcggttagaccaactacagtttccatctttcctcccgacttttacgtcgtatggtttaggttttttagattttaaagcggtaaaacaaatcgtttcatagcccggtagggcctaccttcccgtttcaccgggaaggacatcagactagtcgagactggtcttaatggttctcttcgtgcgccatcgacaggtagacgatggtcagcatcatgaagatgaaggcctgcagggtgatgatcaggatgtggaacacagcccacgcccactgcagaaccacgcccaggccgctaagccagagcagaccactgccgaacatcacagcgatcagaatgaacaccagctcgccggcatacatgttgccgaacagtcgcagggccagggagatcggcttggcgaccaaggtcacgaattccagcaggaagttcaccgggatcagcagggcttgaacgaagatgttcttgctgccgaacgggtgcagggtcagttcgccgatgaagccgccgatacccttgaccttgatgctgtagaaaatgatcaacgcgaacaccgacagggccatgcccagggtggcgttagggtccgtggtggaaaccgcacggaatgggatgtggtggtcgccggagatcaggatagccagttgaggaatccagtcgaccggtaccaggtcgacggcgttcatcaggaacacccagacgaagatggtcagtgccagcggtgcaatcaccgggctgcggccatggaagctgtctttcacgctgccatcgacgaattcgaccagtacttcaacgaagttctgcaaagcacctggctgaccggaagtcgccttctttgccgccatgcggaaaatcaggacgaagatcagacccaatgcgaccgaccagcccagagtatccaggtggaaagcccagaagcccatttctttggcttctgctgcggagtgggcaaagccccagccgccattaggaagctgaccgaaggtcaggttctgcaagtggtgctggatatagcccgaagcggttgtttctgccatggttgcctcaaacgccctaaggtttcgaaagtcttgttttcattagcaggggagcgaaccagctgaccagttgggtcaacacgaagacgccgaatacagccagcggcgccaatggcttcacacctgcaaaggtcagtgcaaacagcactgccgtcaaaatcagtttccccgcctcgccagcataaaatgaccggacgatagcctgggctgctcgggcgccggaaaaccgaaaggccctgtgagcaaaatacatattgggcagcaaggctatcaggcctccgcagagtcctgaatatccgactacgactccatgccaataccaaagcgccaatgcggcgatcagcaagatgacaaattgagccaataaaaccggaaaaacggccaagcgatggaacggcaacgtgtttggcgtgcgggtttccatcactcttgctcctcaatggtcggctgccggaaatcaataacttggcataatttgtgccgacaaaatgcgcgcagagtataggggcggttctgcccctattcaactgccgggtagtgatttccgatcacgcgctacataagcaaatgtttcagcggatgtgggcaaggacgccctgaagctcatcaagggagttatatccgatgaccaattggcctttgcctttcttcccgtggcgaatttgcaccgcagagcccaggcgctcggccaggcgctgctcgagacgggcgatatccggatcaggtttggccgtttcgaccggtgcaggtttgccgctgagccattggcgaaccagggcctcggtctgacgaacggtgagcccccgtgcgacaacgtgtcgcgccccttcaacctgttgattttccggcaaaccgagcagtgcacgggcgtggcccatttccaggtcgccgtgggacaacatggtcttgatgacttccggcaacgcgatcaggcgcagcaagttggacacggtcacgcgggatttacccaccgcttcggccacttgttgctgggtcagctggaattcctgctgcaaacgctgcagggcgatggcttcttcaattgggttgaggtcttcgcgctggatattctcgatcaacgccatggcgatggcggtttcatccggcacatcgcgcaccattgccggaatggtttccttgcccgcctgctggctcgcgcgccaacggcgttcaccggcaatgatttcaaagcggccgccaccgatcgggcgtaccacgatcggctgcatcacgccctgggccttgatcgaattggccagctcttccagcgcctgggggtccatgtcccggcgtggctggtatttgccgcgctggatcaggtccagcggcaggtgttgcagctcgcgctcgtcggcctgcaccgcttgttcttcaagcgatgtgacggtcggaccactcaacagtgcatccagtccacgtccgagacctcgtttcttgacggccatggggattccttaagttggctgggctgcagcagtgcgtgaattgcggcgttggcgacgaaccatctcgccggccagcgccaggtaggcaatggcaccacgggattgtttgtcgtaggccaaggccggcatgccgtagctcggggcttcggccaaacggatgttgcgtgggatcaccgtgtcgtacagctggtcaccgaagtgttccttgagctgcgccgatacatcgttcatcaggctcaggcgcgggtcgaacatggtccgcagcaagccttcgatctgcaggttcgggttgagcaactcggcgatgcgcttgatgttatccacaaggtcgctcaacccttccagcgcgtagtactcacactgcatggggataatcaccccatctgccgctaccaacgcgttcagcgtgagcatcgacagcgacggcgggcagtcgatcagaatgtagtcgtaattctcgcggatcggcgccagggcgctgcgcagacggctttctttcatctgcatttccagcagcaccacttccgccgcagtcagatcgcggttggccggcagcagttgataaccaccgtgctcggaatagtgcatggcctgggccaggtcgcactcgccaatcagcaagtcgtagaccgagttttccaggccgtgtttatccacaccgctacccatggtggcgttgccctgtggatcgagatcgatcaacagcacccggcgcttggtcgcgaccagggatgctgcgaggttgatgcaggtggtggttttgcccacgccacctttctggttcgctatcgcgaataccttagccattcttgcttgtgttcccaatcatgccgtgcggcgcagtatcagcagatggcgttggccttggcaaccgggtacggccaaggcgtgttcgctatcgaggtggaagtctgccggcaatgctaacagctcatcgcttggatggacgcccttcattgccagccagcgggtgtcgcggtcgcccaggtggcgggtccagttgctgaagttctccatgctgctgaatgcccgggaaacaattccgttgaaaggctgttcaggtgtgaaggcttcgacgcgactgtggataacttgcaggttgttcagcttgagctcgagtttgacctgggtcaggaagcgggttttcttgccgttgctgtccaggcaagtcacttgggactcgggaaacaggatggccaacgggatgcccggcataccgccgccactgccaacgtccaaccagcggccgttttcgatgaatggcatcacgctcaagctgtcgagcaagtgacgggacaccatctcgtcgggatcacgcaccgcggtcaggttgtaagccttgttccatttgatcaacagggccaggtagcccaacagcaattcgtgctgggccggggtcaggtcgacgcccaactggcgtgcacctgtggataactcttcggcatgttgcgaggtgaccaacgaactcaagcgctttgctccaactgacggcccgcgccgcgttttttcaaatgaatcatcaacagcgaaatcgctgccggggtgacgccggggatacgtgaagcctggcccagggtctctggccgagttatccccagcttgctttggatttctttcgacagcccggaaatcccggtgtagtcgatatccacaggcagtttggtgtcttcactggcgcgcaagcgggcgatctcgtcctgctggcggtcaatgtaaccggcgtatttggtcttgatttcgacctgctcggcgacctgcgggtcttctgcgccctgtccggtcacttcgaccagaccagcgtagtcgatttccggacgggacagcaggttcagcaagttgtattcgtgggtcagtggcgtgccgaatttttcggcaatcgcatcgccctgctcggtgcccgggcggacccaggtgcttttcagacgctgctcttccagcgcgatgctttcgcgttttttgcagaaggcttcccagcgtgcgtcatcaaccaagcccagttcgcgacctttttcggtcaggcgcaggtcggcgttgtcttcgcgcaggatcaggcgatattccgcccgggacgtgaacatccggtacggctcctgggtacccagggtaatcaggtcatcgaccaatacaccgatgtacgcctcatcgcgacgcggacaccagctgtctttaccttgtgcacgcaatgccgcgttggttccggccagcaaaccttgggcaccggcttcttcgtaaccggtggtgccgttgatttgcccggcaaagaacaaaccgccgatcactttggtttccaggctgtacttcaggtcacgcgggtcgaagtagtcgtactcgatggcgtagcccgggcgcacgatgtgcgcgttttccatgccgcgaatcgattgcacgatctggatttgcacgtcgaacggcagggaagttgaaatcccgttcgggtacagctcgtgagtggtcaaaccttcgggctcgataaagacctggtggctttccttgtcggcgaagcggtggatcttgtcttcgatcgacgggcaataccgtggaccgatgccttcgatcactccggagtacatcggcgaacggtcgaggttcgcggcaatgatttcgtgggtgcgcgcattggtgtgggtgatccagcagctcacctgtttcgggtgctggtccttggagcccatgaacgacatgaccgggatcggtgtatcgccggcttgttcggtcatcaccgagaaatccacggaacgcccgtcaatacgcggcggggtcccggttttcaagcggccgacacgcagcggcagttcacgcagacgttttgccagggcaatcgacggcggatcaccggcacggccaccggaatagttctgcatgccgatgtggataagtccgccgaggaacgtaccggtggtcaacaccacggattctgcgaagaaacgcaggcccatttgggtgacaacaccgcgcacttggtcctgttcgacgatcaggtcatctgctgcttgttgaaatatccacaggttcggctggttttccagggtttcgcggaccgcggccttgtacaggatgcggtcagcttgagcccgggtagcacgtacggccgggcctttgcggctgttgagcacgcgaaattggataccgcctttatcagtagccatggccatcacgccgccaagggcatcgatttccttgaccagatggcttttgccgatcccaccaatggcagggttgcaactcatggcaccgagggtttccacgttatgcgtcaacaacagggtttttacgcccatgcgtgctgacgccagtgctgcctcggtaccggcatgaccgccgccgatgacgatcacttcaaaacgggaagggaaatccaccacgcacctcgtgcctgcttatttaggtaatcaggaattgattgttgaaagagttttagagctttggcggcaagtatagggacttagcccttcctaaagaaccctttgcacaaaatttaaccagctgtggatgaatcacagacaatagaaattaaaagagagaaatttattaaatctttgtttttatgtttatttctactgagctgactttctgtggatagatttacacaggcctttatttacggtgtgtacagcgattcaaaagtctgtggtcatgtgccaatgaggcccttggataagtgctttaagcctgtggattaaacaggttgttatccacagatgcgtttttgctcaggtttcagggcctgttatcaactgggcacaggggcggttattcacagagcttaatccacagaaatcagtgaatttgtctgtattcagcccacgacaacgccaaccgaaaccttccactcggtggtgagcacagcaaaaagagatctgttgtgagaaaacggcggggcagttaataatagcgattatcattaacctaccttgtcatgccctatgtcctcttcttcacacacggctgcggtccagcacatctatgagcagcaccactcctggctgcacggatggctcaaagggaagttgcataacgcctgtgatgcggccgatgtggcgcacgatacgttcgtacgcatcctgggcgggcgccatgcggcacagatcgttgagccgcgtgactacctggcgactatcgccaggggcctggtgattgatcgttaccgtcgacacgcgatcgaacaggcctacaaacaaaccctggccgaacggcctgaagccataaccatcagtgaagaagacaaagccatcatcatcgagacgttggtggctgtggataaagccttgtctgcactcggcgagcgagcgcggcggatattcatgctgtcccaggtcgaagggctgacttatcaacagatcgccgatcagcttcaggtttcactgaccacggtgaagaagcacatgatccgagcgttgactgaatgtgcgctgatcatggccagcctgtgatggcggtgcccgatcgcaagaccttcgaggccgctgccagttggtacgtccagtttcaatcccagacacccaccgccgatgagcgccaagcctggcaacgatggctcaacggcgatccgtcccatcaggctgcgtggaaccagatggaacagctgcagcgcagtctcggcgcgctgcctgcggatttcacccgccgcgcattgtcgaccacacagcaacgccgccaggtgctcaagtggatgttggtgctgggcggcaccgggtacctgggttggaatgttcagcaacacacgtccctgggtagtgtgtgggccgattatcggacggtcgtaggtgaacgccggcgcattgaattggccgacggcacgcggattgatctgaataccggcacggcgattgatgtgctgtttgatgggcgccagcgtttgatccgcctgcgcgaaggtgaggtccttatccacaccggcaagcggggcgtgcagacgcccttttatgtcgaaacccgccaaggccgcatccaggcattgggcactcggtttaccgtgcgccagatgcatgactcaacccgcgttggcgttctggaggatcgggtgaatgtgtcgcctggtgaccagcccaaccaggctcggctgctcagtgcgggtgaaagcgcagacttcgatcgccaaatagtgcagccaaacgccgtttaccgcacatcccaggcagcctgggtcgatggccaactgatcgtattggatgcacgcctcggtgatgttgtcgaagaactcgcccgctatcgcccaggtgtcctgcaatgcgaccgggactcggcacatctgcgtgtttccgggacttttcgcctggattccaccgatgcggtgctggccaatctgcaggccaccctgccgattcaagtgaaatacttcactcgctattgggtttcggtgaagcgaatcggctgatcgaaaaaatatacgcacgcagggttatcttttttttacctgacacggccctacaggtaatcacgatgccaccttcagggcttacccacctatgcgcgttcccaccaagctccgccagcgactttcctaccacggtatgacatgcagcctgctgctcggcacggccgccactgtcggtgtgttgttatccacaagcgccctggccgccagcgcggtgcagcactacgttattgcggccggccccctggataacgccttgagccaatttgccgccaaggcgaatgtgatcctgtctttttcacctcagcaaaccacgcgtttaaacacagctgggctggaaggtgactactccgtggaccaaggttttgcgctgctgctgcaaaactccggtttacaggcggtagtccaggcgcctggcagttatgtcctgcaggccgcttccaccggcgaactcacgctcgcgcccaccacggtcagcacttatcaacagggcggtttcaatcaggagattgctggagatgtgggctacaaggcgcagaacagtagagttggtaccaagaccagtacgccgctgtcggaaacaccacgttcggtatcggtcgtcaccggccagcgcatcaaggaccagaagtcgcaaaccctgaccgaagtgttgggctacgtgcccggtatctttgcaccaccctttgccgccggtgatgggctggcgggcgatctgttcttcattcgcggttttaatgccacggattacggctacggcctgctgcgagatggcctgcgtgtacaaggtaatcggtacgacaccaccagtgagccctatggcctggaacgggttgaaatcttccgtggtccttcttccctactctacggcgaaaatgcgcctggcggtctggtgaacctggtgagcaaacaccctactgcgacgccgcaaggtgaagtgcagttgggttatggctcgaataatcggcgtcagttgggtgtggatatctccgggccgctcaatgacagcggcaatatccttggccgggtagtgatgctcggtcgcaaatccgacacgcagaccgaccatgtgccagacgatcgcctatacatcgcgccatcactgaccctgaatttcgacgactacaacaccctcaccctgttggccaattaccagaaagaccacactaatttggaactcggcctaccggctgccggcaccttacttacaaaccccaatggcaagctctccaagcacactatgctcggcgacccggattggaatacgtttgaacgcgaagcctggagtaccggttacgaattcagccacagcttcaacgatgactggcagttccgtcagaactcgcgctacatgcagtctcgcatcaaccgccatgaaacctggcccagcgcgctgaacaatcgcggcttcgggactcagttgaacatgaccgcttatgaccgctacaacaagtcgatggtctattcgctggataaccagctggaaggcaaattccaggtcggcggcctggaaaacacggtgctgttcggtgccagctatgaccgcacttcgttcagtcaggattgggacgcggggtttgccggcaccatcaatgtgtataacccggtgtacctgcgtgacccgctgacgccggtggcggtgcaaaacaccctgctcgaacagcagatgaaaggcgtttatgcacagatccagagcaagtacgaccactggctgttcctgctgggcggccgtcaggactgggtcgacagcgatttccgcgacaaggtcaacaaggccagcaacaccggatccgatgaccgcaagttcacctaccagggcggggtgatgtaccagttcgacaacggcctgacgccgtatgtcagctactccactgcctttgtccccgtgcagcagatctccaacgccggctcgcccttgaaaccgatcaccagcagccagtacgaagtgggcgtgaagtacgagccgatcggctgggatacggcgatgacggtgtcggtgtatgacttgcgcaaggaagacgacacttacctcgatgccaccaccaatagctatcgccaagtgggcgaaagccgggccaagggcgctgaggtagaggtcaacagtaacctcacgcctaacctcaatgtcaccgcagcctatacctacactgacgcgaggattaccaaggattcggcgacatcgttggtcgagggccaccagatgaccggggttccgcgtaaccaggcctcagtgtggggcaagtaccgcttcctcgatggccaactcaagggcttgtccctgggcggtggtgtgcgttatttcgacagtaccttttcctacaccgcacccacgctttacggaaaattggatgcaggaagcgtcaccttggtggacgcagccgttggctatcagatagacaaacactggtctgtggatgtaaatgccaagaacctgttcgataaggaatatgtatctggttgcaacgatgcgggccgctgctattggggtgacagccgtaccctgctcggtacggtgtcttacaattggtaggacgctgtggataactcggttatttaccgatgcagaagctggaaaagatccgccccaacaaatcatcggagctgaacgcgccggtgatttcgcctaacagctgctgtgcctgacgcaaatcttccgccagcagctccccagcccccgccaaggttaattgcgcccgaccgtgctccaacgctgcgctcgcatggcgcaacgcctccaggtgcctgcggcgcgcactgaagctgctttccgaggtctgctcgtagcccatgcaggccttgaggtgctctcgcagcagttccaagccttcaccggccgacttcgcactcaggctgatcgtgacgtggccatccgcgctggtttccagcgcaatggcttcaccggtcaagtcagccttgttgcgaatcagggtgaccttggcagggtccggccggtgctcaaggaattccggccacagggcgaaaggatccacagcctcgggcgccgtagcgtccactaccagcaatacccgatccgcctcgccgatggctttgagcgcgcgttccacaccgatcttttccacctggtcgtcggtgtcgcgcaaaccggcggtgtctacaacgtgcagcggcatgccgtcgatgtggatatgttcgcgcaggatatcccgtgtggtgccggcaatctcagtgacgatggcggcttcacggcccgccagggcattgagcaagcttgatttccccgcattgggccgccccgcgatcacgacggtcatgccatctctcagcaaagcaccctgcccggcttcacgcagcactgtggataactcatcgcgaactttatccagcatcgccaatacgtggccatcggcgagaaagtcgatttcttcttccggaaaatcaatcgccgcctcgacgtagatacgcaggctgatcagttgctccgtcaagttatgcacacgcagggagaacgcaccctgcagggagcgcaatgcattacgtgcggcctgtgcagaactggcttcaatcaggtcggcaattgcttcggcctgggccagatcgagcttgtcgttcaagaacgcccgctcgctgaattcacctgggcgcgccaagcggcagcccaattgcaggcagcgctgcagcaacatatccagcacaaccggaccgccgtgtccctgcaactccagcacatcttccccggtgaatgagttcggcccagggaaatagagcgctaatccttcgtccagcacgccgccgtcagcatccaggaactggccgtaatgtgcataacgcggcttcaactcacggccactgatggccttggctgccacgcccgcgagcggccctgaaattctaacgatgccgacaccgccgcgaccttgagcggtagcgacagcagcgatggtttcacgaggagcgctcatcaacagtttccagaccaaaagtgacagaaagcaaaacgccccactagggggcgtcttgagtggttatccacagagtaagttacgcagaggcttttgcggtagccgcttcgatcttacgtgtgatgtaccactgttgagagatcgacaacacgttgttgaccacccagtacagcaccagaccagctgggaaccacaggaagaagaaggtgaagatgattggcatcattttcatcactttggcctgcatcggatccggcggagtcgggttcaagcgctgctggataaacatggtcgcgcccatgatgatcggcaggatgaagaacgggtctttgatcgacaggtcagttatccacaggatgaacggcgcctggcgcatttccacgctttccaggagtacccagtacagcgacaggaacaccggcatctgcaccagaatcggcaagcatccacccagcgggttgatcttctctttcttgtacagctccatcatggcctgcgacattttctgccggtcatcgccatgttgttctttcagcgccgccagtttcggagccacggcacgcatgcgcgccatcgacttgtagctggctgccgacagcgggaagaagatccccttgatcagcatggtcaggaagatgatcgagaagccccagttacccacaatgctgtggatatgttgcagcaaccagaaaatcggctgggcgatgaaccacaggaagccgtaatccacagtcagctcaagacctggggacaactctttcagcacagcctggcttttcgggccggcgtacaggatagcgctggtttcagccttggcgccgggtgcgacggtcaacgccgggccggtaaagccaatgatgtagttaccttggctgtccttgcgggtttgaaccaggttggcttcacccttgttcgggatccatgcggtcacgaagtagtgctgcagccaggcaacccatccgccttgaacggtttctttcagcgagcccttgtcgatatctttcatcgacacttttttgtacggctcgctacttgtccacagggcggcgcccaggtaagtcgcggtgccggtagcagtgctggaagaaggatcggagctggcatcacgcttgagctgggcaaacaggttgccgctccatggtttgtcgctttcgttgtcgatcaggtaagtgaccttcaagtcgtacaaaccacgggtgaagctgaagcgcttgatgtagttgacgccgtcgaggctgaatttcaggtcgacgttcaactggttctggccatcagccagttgataagtcttctgttcggtcgagtaaatcggacgaccggtagcacgtgcatccggaccattggtgccggtcaggccgctttgcgccagataagtacgctcaccaccgttatcgaacagttggaacgggacatccggatggtcttggcgacgtggatacagcggcagtttcaactgcgcaatatcaccaccttgtgggtcgatagccaggtcgagcacatccgttttgacgtggatgaggtctttgttggtgaccactggcgtttctaaaggggcgcttgtctcgccattcgcgctgggaacatcggcactcgcggacgcattgttacccagcggggtgtccggaatagccggcgcagcctggttggtagcaacattctgagtcggcagggcagcctggccgtagtcctggttccactgaagaaccatgacgtaggacacgattgccagggcgacgatcaggatcgtgcgtttaatatccatgattactcggccatcgaagaagaacgggaggtagggataggtggaaccgggtcataaccaccgggattccacggatgacagcgacctaaacgacgaaaggtcagccagccaccgcgcagaagaccatggttttctatggcctctaacgcgtagcaggaacaactggggtagaaacgacagtggttggccatcagaggactaatggcatagcgataaaactggatcggaacgagtgccagtttacgcatcaaggctgtctacccctacagtttcggtgctgactgctggtgctggcttgtgggtacgcgccaaacgtttccagagcttgccgaaatgctgaatcaattcggggttttctacgtcccccaagcctttgcgcgcgacgataacaatatcccaaccaaccagagtgtcctggtggaggcgaaacgattcgcgcatcagacgcttgaggcgattgcgctcaacggagagctttacgctcttcttgccgatcaccaacccgagtcggggatgatccagatcgttgttacgcgcaaggagcaggagatttttccccggaaccttgccggtgggggagtcaaagactgccttgaaatgccggggggttagcagacgcttttcccgactgaagtcctgactcaccaccagtaccggattatcaaactgccagacgcgcacgacctttggcgcgacgacgcgacaggacagcacggccgttcttggtagccatgcgagcacggaagccgtgggtgcgggcgcgtttgatggtgcttggttggaaagtacgtttcatggcgttgttacctggttcgtccacaacgggccggaatggcccccgttttaagagaccggcgattctagtgaaagcaagcctctaggtcaatttccaaccagcttttcctttaattagatctccacaggccattggctcttttctgtccgtttggtttccagtggtcatgggatagatataaaaataaagaaggaagttatttaaagcttttctgtaaagcttataaaagctaggtaggcgttcatctgtggataactcacttgaggccatattccacctggtgtacagagaatgacaacccgggggagaaacggtgctctgcctgtgctgcgctgtcggataagctgtgcgtggaacgggatgttatccacaggccagttacccacagactttctcccccacttgtgcaacgacctcaggtaggcttatccacagagcttatgcacagaccattggtcgcctttattaccgttaagacgttgattttggccggcctgtgatcaagctacatgtggataagtggacggctcgccgctacaatggcggctgtttttgcctcaccggctttcaacttaggggatatccgtgtcagtggaactttggcagcagtgcgtggagcttttgcgcgatgagctgcctgcccagcaattcaacacctggatccgtccgctacaggtcgaagccgaaggcgacgagttgcgtgtctacgcacccaatcgttttgttctcgattgggtcaacgagaagtacctgagccgcgttctcgaattgctcgatgaacatggcaacggcctcgcgcccgtgctctccttattaataggcagcaaacgcagctctgcacctcgagctgctccgaatgcgccattggccgctgcggcgtcgcaagcccaggcagccgccacaccggctgccagtgcgcctgctcctgcaccggcggcgtccaaatcgtctgcgcgaaaaagtgcgccagaaaacgaagagccatcccgcgatagctttgacccgatggcaggcgccgcgtcccagcaagccccggtccgcgccgaacagcgcaccgtccaggtcgaaggcgcgctcaagcacaccagctacctgaaccgtacgtttaccttcgagaatttcgtcgaaggtaaatccaaccagttggctcgcgcagccgcctggcaggtcgccgataaccccaagcatggttacaacccgctgttcctttatggtggtgttggcttgggtaagacccacttgatgcacgctgtgggtaaccacctattaaagaagaacccgaatgccaaggtcgtgtacctgcactcggagcgcttcgtggctgacatggtcaaggccttgcagctcaacgcgatcaacgagttcaagcggttctatcgctcggttgatgcgttgctgatcgatgacattcaattctttgcccgcaaagagcgttcccaggaagagtttttccacaccttcaacgccctgctcgaaggtggccagcaggtcatcttgactagcgaccgttatccgaaggaaatcgaaggcctggaagaacgtctgaagtcgcgcttcggctggggcctgaccgttgcggtagagccgccggagctggaaacccgcgtcgcgatcctgatgaaaaaggccgatcaggccaaggtcgacctgccacacgatgccgccttctttatcgcccaacgcatccgctccaacgtgcgtgaactcgaaggtgcactcaagcgggtcatcgcgcactcacacttcatgggccgcgacatcaccatcgagctgattcgcgaatccctcaaagacttgttggcgctgcaggacaaactggtgagtgtggataacatccagcgcaccgtggccgagtactacaagatcaagatttccgacctgttgtccaagcgccgttcgcgctcggtggcacgtcctcgccaggtggccatggccctctccaaggagttgaccaaccacagcctgccggaaatcggtgatgtgtttggcggacgcgaccacaccacggtcttgcacgcgtgccgcaagatcaatgaacttaaggaatccgacgcggatattcgcgaggactacaagaacctgctgcgtacactgaccacttgatgacaccagcgcagcttattaaggcaagggactagaccatgcatttcaccattcaacgcgaagccctgttgaaacccctgcaactggtcgcaggcgtcgtcgagcgccgacagaccttgccggtgctctctaacgtattgctggtcgtccaaggccagcaattgtccctgaccggtaccgacctggaagtcgagctggtcggccgtgtacagctggaagaacccgccgaacccggcgagatcaccgtgccggcgcgcaagctgatggacatctgcaaaagcctgccgaacgatgcgctgatcgacatcaaggttgatgaggcgaagttggtcgtcaaggccggccgcagccgcttcaccctgtccacgttgccagccaatgatttcccgacggttgaagaaggcccgggttcgctgacctgcagcctggatcagagcaagctgcgtcgcttgatcgagcgcaccagctttgccatggcccagcaggacgtacgctactacctcaacggcatgctgctggaagtgtcggaaggtatcatccgcgccgtcgctaccgacggtcaccgtttggcaatgtgttcgatgcgtgccgatatcggccaaccggatcgtcaccaggtgatcgtgccgcgcaaaggtatccttgagctggcgcgtctgctcaccgagcccgaaggcaacgtcagcatcgtgctgggccagcaccatatccgcgccaccaccggtgagttcacattcacttccaagctggtcgacggcaagttcccggattacgagcgcgtgttgcctaaaggtggcgacaagctggtgctgggcgatcgccaagcgctgcgtgaagcgttcagccgtaccgcgatcctgtccaacgagaagtaccgtggtatccggctgcaactggccaacggtcagttgaagatccaggcgaacaacccggagcaggaagaagcggaagaagaagtgggcgttgactacaacggtggttcgctggaaatcggcttcaacgtgagctatctgctggacgtgctgggtgtgatgaccaccgaacaggttcgcctgattctgtcggactccaacagcagcgccctggtgcaggaatccgacaacgacgactcggcttacgttgtcatgccgatgcgcctgtaaccatgctcagcagaagctagatgtccctcagtcgcgtctcggtcaccgcggtgcgcaatctgcacccggtgaccttctccccctctccccgcattaatatcctccacggcgccaacggcagtggcaaaaccagcgtgctggaagccatacatctgttggggcttgcccgttcctttcgcagcgctcgcctgttacctgtcatccagtacgagcaattggcctgcacggtgtttggccaggtcgaactggctgaaggtgggcacagcagcctgggcatatcccgagatcgcggtggagagttccagattcgtattgacgggcaaaatgctcgcagtgccgcgcagcttgcggaaattctgccgctgcaattgatcaaccccgacagctttcgtttgttggaaggtgcaccgaaaatccgcaggcagttcctcgattggggagtgttccacgtggaaccacgtttcatggccacgtggcagcgcttgcagaaggccctgcggcagcggaactcatggctgcggcatggtacacttgacgccgcttcgcaagcggcctgggaccgggaactgtgcctggccagcgacgaaatagatgaataccgccgcgcctacatcaaagccttgaaaccagtctttgagcagactttgagtgagttgttggacctcgaagggctgacgctgagttactaccgtggttgggataaagaacgtgagctgagtgctgtgctcgcgacgtccctgcagcgggatcagcaaattggccatacccaggccggaccacaacgggctgatttgcgccttagattaggcgctcacaatgccgcggacatcttgtcccgtggtcagcagaagttggtggtgtgcgcgttgcgtatcgcccagggccatttggttagccaggctcgacgcggtcagtgtatttatctggtggatgacttgccgtcggaactcgacgagcagcaccgccgcgcgttatgccgcttgttggaagaattacgctgccaggtgtttatcacttgtgtagaccacgaattattgagggaaggctggcagacggaaacgccagtcgctttgttccacgtggaacaaggccgtatcacccagacccacgaccatcgggagtgaaggcatgagcgaagaaaacacgtacgactcgaccagcattaaagtgctgaaaggtttggatgccgtacgcaaacgtcccggtatgtacattggcgacactgatgacggtagcggtctgcaccacatggtgttcgaggtggtcgacaactccatcgacgaagctctggccggtcactgcgacgacatcagcatcatcatccacccggatgagtcgattaccgtgcgcgacaacggtcgcggtattccggtagacgtgcataaagaagaaggcgtttcggcggcagaggtcatcatgaccgtgctccacgccggcggtaagttcgacgacaactcctacaaagtctccggtggtttgcacggtgtgggcgtgtcggtagtgaacgcactgtccgaagagctgatcctgactgtgcgccgtagcggcaagatctgggaacagacctacgtccacggtgttccacaggaaccgatgaaaatcgtcggtgacagtgaaaccaccggcacccagatccacttcaagccatcggctgaaaccttcaagaatatccacttcagctgggacatcctggccaagcgtattcgtgaactgtcgttccttaactccggcgtgggtatcgtcctcaaggacgagcgcagcggcaaggaagagctgttcaagtacgaaggcggcttgcgtgcgttcgttgaatacctgaacaccaacaagactgcggtcaaccaggtgttccacttcaatatccagcgcgaagacggcatcggcgtggaaatcgccctgcagtggaacgacagtttcaacgagaacctgttgtgcttcaccaacaacattcctcagcgtgacggcggtacgcacctggtgggtttccgttccgcactgacgcgtaacctgaatacctatatcgaagccgaaggcctggccaagaagcacaaagtcgccaccaccggtgacgatgcgcgtgaaggcctcaccgcgattatctcggtgaaagtgccggatcccaagttcagctcccagaccaaagacaagctggtgtcttccgaagtgaagactgccgttgaacaggaaatgggcaagtacttctccgacttcctgctggaaaacccgaacgaagccaagctggtcgtcggcaagatgatcgacgcggcacgtgcccgtgaagcggcgcgtaaagcccgtgagatgactcgccgtaaaggcgcactggatatcgctggcctgccgggcaaactggctgactgccaggagaaggaccctgccctctccgaactgtacctggtggaaggtgactctgctggcggttccgccaagcagggtcgtaaccgtcgcacccaggctatcctgccgttgaagggtaagatcctcaacgtcgagaaggcacgcttcgacaagatgatttcttcccaggaagtcggcaccttgatcacggcgttgggctgcggtatcggtcgcgacgagtacaacatcgacaagctgcgctaccacaacatcatcatcatgaccgatgctgacgtcgacggttcgcacatccgtaccctgctgctgaccttcttcttccgtcagttgccggagctgatcgagcgtggctacatctacatcgcccagccgccgttgtacaaagtcaaaaaaggcaagcaagagcaatacatcaaagacgacgacgccatggaagagtacatgacgcagtcggccctggaagatgccagcctgcacttgaacgacgaggctccgggtatctccggtgaagcgttggagcgtctggttaacgacttccgcatggtgatgaagaccctcaagcgtctgtcgcgcctttaccctcaggagttgaccgagcactttatctacctgccagccgtaagcctggagcaactgggcgaccacgcgcacatgcaggactggctggcccagtacgaagtgcgtctgcgcactgtcgagaagtccggcctggtgtacaaagccagcctgcgtgaagaccgtgaacgcaacgtatggctgccagaggtcgagctgatctcccacggcctgtcgaactacgtcaccttcaaccgcgacttcttcggcagcaatgactacaagactgtggtcaccttgggcgcacaattgagcaccctgttggacgacggcgcttatattcaacgtggcgaacgcaagaagcaggtcaaggaattcaaggaagccctcgactggctgatggctgaaagcaccaagcgccacaccatccagcgctacaaaggtctgggcgaaatgaacccggatcagctgtgggaaaccaccatggacccggcccagcgtcgcatgctgcgcgtgaccatcgaagacgccattggcgcggaccagatcttcaacaccctgatgggtgatgcggtcgagcctcgtcgtgactttattgagagcaatgccctggcggtctccaacctggacttctgattctggtagtctgctgaacccaaaaggccaacgctatgcgttggccttttttattgggtgaatatcggctgtctgctgaatgctccacgtggaacattctggtttttagccctgtggtgagggcaccgctacactttccaatcggtaaccgtacccatagatcgtcaacagctgccaccccctatccgcggtcagtcccaacttattacgcagtcgatagatgtgcgtatcgagcggccgcgacgacaccatttcttcgtgggtccaaaaccgctcatagagatactctcgggaaagcggtcgggccaggttggcaaacaagcaactggccagacggtactcgcgttcggtgaggttgatcggtttgcccgcccgggtcacggtcaactccgcatcatcaaaggtcaggtcgttgaagctctgcacttcatggttggctgatttctgcaggccgtggcgacgtagaaccgcagtcaccctagccttcagttcattgggacggaagggcttgctgacgtaatcatcggcaccactgttcagcgcagtgacgatatcgctctctgcatcgcggctggtcagcatgatgaccgcaggcggcgactccatgtgttcacgggtccagcgcaacagagcaataccgctgatatccggcaattgccaatcgagtatcaacaggtcgaaggtttcccggcgcagttggcgtagcaggtcttcaccgcgttcgaaacagtgcagggtccagggttgttcggcggtgctggggatttgtcgcagtgtctgttccacccgtcgcagttccgcgggttcgtcatccagtattgcgacacgcatgggtgggtcctttcttcttgaagagtacggcagccgtcagccgggttagtgatggcacgcactgcgcagatgccggtctctgaatctgaagaattgtgttcagatccgtcgaccccttggatctctcggtacgctggcatcaatgtgcgattaacccattgaaagtccttgataccgatgtgggaaagataccggctcccgcccataaggaaaaggatcagccgacgcatgcgctgccgtacactcctgcttgctggtgtcagataccttctggaacccaatcttgatgagcaccatgatcctttcttcgaaccgcctgtgccgcgccctaccctcattgttgatcatggctgtcggttctgcaggggcggttggcaagacgcgcgcgccttacattgatgatcacatactgtgtcacccccagcccctgccggcggtggttcagcatctcaccggggaagcctggaaaatcgataccaagggcgaggcgagccttttgctggaaggcatgaccattgacgaacaggagggtgtgaagacctcggcgtcggcgttcgtcagcctgttgctcggtgacggatcccgcgtggtgttgcccgcaagttcacaggttcgattgcatctggagcgcaagctgtcgattccccaggttgtactcgaacaaggtcaggcggaagcgtatgtgatcaagcgtgccagcgaccatgatcgttttcagatcgtgacccccgtgggggtgttgggcgtacgcggcacgcatttccgggtgcgtaacgacgctgagcaatcggtgctcgaagtgttggacgggcaggttgccgtcagccgcgaggcaaaaaaccagccgatggaacaggaggtaaaaatcggtgcccggcaaggtctgctgttcaggaagcagggagacctgaaaccggttgagctacttgctgcaccgaagctcgtgggtcaggacggccagaaaggcgatgcgccggtctggagcctgtaccttcggcctttgcccggagcccagcgataccgggcacaggtcgctaccgacaaagccttcatggacatcaagcatgaaaacttttccagttcgccgaaaatgagcttcactgggctcaaagcctcgttctaccacgtgcgcctttcggcctacgatgaaaacgggctggagggagagaccggggtctatgacatcttttactacccacccaccacccaggcacattgacctatgaagctctggggcaagaccgagaaacgccagcccacccatgcccagcgcctgtttcatggcctggtgcgcgagtggttgtggatcgggttgctattgctgcctgttaccgtctatctgtcgttgagccccggcctggcgttgaataatccgctgtacgacagccttcggcgccttaccccgctgcctgtagacccgcgcatcctgctggtgaccattgatgacgccagcctgaaaaagctcggccaatggccctggccacgcagcttgcacgccgacctgatcgaccgcctcagcgctgggcaaccggcgggtatcctcttcgatgtgatcttcagtgagcccggcgaccccgccaatgacaaacgcctggccgaagcggtatgcaatgccggcaacgttttactgccgctggtacgtgagggcactgctagttatagccagcccggtgggcagatgctggcgctgcatagatgcgccaagggcgtgggccacatcaatgtcgaagcggacagcgacggcgtggttcgcagcctgtatctgcgcgaaggacctcccgacacgacggcaccgcaactggcctggctggcctatgagatgagcggggagctatcggacatgccgggcgagccgcagcaggcgacttcacaacactggcaccgcgagcacgccatccgtatcacgtttatcgccccccatacccatttccccagcgtgtcctacgtcagcgtattgcgtggtgaggttcctcccgagcagctaagaggccgcttgatcctggtgggttcgacggcttccgggatgggggatcggttcgtcacccccctctcctccacggtcggtacaacggcaggggtggaaatccaggccaacgtgctcaacggcttcctccaaggccgcagcatcgtcgacctgccgggctggctcgcggcgctgatggcgacttctctggtggcgttgttgctgggcctgctgctctaccgcccgcgctatgcgctgtggatgactctgggctgtatggctgctgcgttacttggcgcctgggccttgttgcgccttggccactggtggtcgcccgccgcatgcctgattggtttgctgcttagctacctgatctggaactggcgtcgcctgagcgtgatcctcgcctacttcggctgggaactggcgcgcctggataacgaacccaaggtcctgcccgaacgccgccgtgcgcccgccagcaaaggcgacgtgctgcaggcgcggatctttgccctggagcaggccgtaagccgcacgcgcgatacacggcgcttcatggcagatgggttggagtgcctgccggtggcgacgctgatcaccgaccccaagggcaacatcctgctggccaaccgcattgcccgcgaagtgttcggcaatgacctggtcaccgaaaacctgctggagcaattggccgacctgggctacccgccgctgcacaatggcgtgcgccctgccctttcggcgctggaactggtcgagttccgcgacatccaccaacgcagcctgcgcatggaattggcgcccttgctgccggccgagggtgatgttgcactgggctggctgttgagcctcactgatttgagcaaggagcgcgaagcgcaacaacaccgcgaaaccatgttgcgcttcctttcccacgacctgcgtgcgccgcactcggcgatccttgcgctgctggatgtgcataacgacgagtccccggtattcgcccagatcgaacagcaggttcgccgtgccttgggcctcactgaatctttcgtgcaactggcgaaagccgaagctgacggttaccagttccagccgacgctgtttgccatgttggtgatggatgcattcgatcaggtggcgttgattgcccagctcaaggggatccacctggttcacgacctggatgaagctgacgagggcatggtctccgctgaccagtcgctgctcactcgggcgttgttcaacgtgctggagaatgccatcaagtattcgccctcgggcaccactgtcaggttgagacacagcagtgcacaaggttggttggaatgccgtatcagtgaccaggggccggggattgcagcagaggacttgccggagctgttcagccaataccggcgctttgaatcggcacagggcagtgaaggattggggttgggcctgacgatggtcaaggctgtggtagagcgccatggtgggcgcatcagctgcgaaagcgtggtaggcaaaggcaccacattcagcgtgcaattacccctgctggaagactgaaaaaacgtactttagtgttgtgaataaaaaaccggtcgcaaggaccggtttttttatgcagaaaaaacttatgcacctttttcttgattttatgggcttgagaaatatgcaataaaatcagcttgttatgattcaaaaagcgcaattcgccaacaaaccgtacacaggttatccacagatgctcagatcaccggagtgtcgaccacaacaggctctggcggcagcgaacccatggcccgttgctgcgcttcattccacgcctgggcgcggtcattcagcgcggcaatggcacgtgggccttcaccttctgcgtacatcggttcgccaatcaccacggtgatggtgccttcgcgcttggcccagccggtctttggccagaacttgccggcgttatgggcaatcggcagcacgggcaggttggcgttgaccgccaaagccgtacccccgcgtgagaacttgcctacggtgccgtagggcacgcgagtcccttccgggaagatcagtacccacacgttatccttgagcagttcatcgcccttcttggccacgtgcttgagcgctgccttggggttgtcgcggtcgatggcgatcggacgcaacatggccatggcccagccgaagaacggcacgtacagcagctcacgcttgagcacctggctcaggggcgagaagtacgccgagagaaagaacgtctcccaggtgctctggtggttcgacagaatcacgcaaggctggtccgggacgttttctgcacccttgatctcgaaacgaatattcagaaacaccttggtcagccacaacgcgcagcggcaccagtagacgttgataaagcgatagcgcgccttgaatggcaaaaagggcgcaataaaaaagctcagggtgcaccagagaaacgaactggtgcccaacagcaggtaaaagaagaaggttctgatggcctgcaaaatcgacatggcggcatttaccgttgcgggacaatgcccgcctgttaaaagcgcactcccgaacagtccttggtcaggaagtcgagggcggctagttgttgataagttctgcggcaacggccgccagatcgtcaaaaatcaaggtgcctaccggcaggtttttcgcctgggtcttttcgcctttcccggtcttaaccaaaactggctgagagtcgacggctttggccgcctccaggtcaccgagactgtccccgacgaaccatagcccagccaagggcaccttgtaatgttctgcaatggttttcaacatgccaggcttgggtttgcggcaatcgcagccctcatctggcccgtgggggcagtacaccaccagccccacctcaccgccctgctcggccaccaatgcgcgcaggcgtgcgtgcatggcgtccaaggtggcgatgtcgtagtacccgcgagcgatgccggactggttggtggcgatggccaccgtccagccggctttgctcaactgcgcgatggcctcgatggagccgggcagtggaatccattccgccaccgacttgatgtaagcgtcggagtcgtagttgatcaccccgtcccgatcgagaatcagcagtttcaccatggtcagctcagcgtcgaaatgtcagcgatattgacgaacaagccgcgcaggcgcgccagcatggcgtagcggtttttccgcacgccggcatcgtcggcattgatcatcacggcttcgaaaaacgcatccaccggctcacgcaaggtggccaggcgcgccaatgcttcggcgtagttgcgctcggcgatcagcggcttcaccgcgttttcggccttggcgatggccgagttcagcgagaactccttggcatcggcaaacaggccagggtcgacatcagcgttgcccaggccttcggccttgctcagcaggttcgacacacgcttgttcacagcggccagggcatcggcttccggcagcttgcggaaggcctgcacggcttgtacgcgctgatcgaagtccagcgccgaacccggctgcagggcacgtaccgacaggtacaccgacacgtccacgccttcgtcttcgtaacgcgcgcgcaggcggtcgaacacaaactccagcacttgctcggccaggccggcctgcttgaccttggcaccgaactggccgacggcaaacaccacggcctgggtcaggtcgaggtccagctttttgtcgatcaggatacgcagcacgcccaaggccgcacggcgcagggcatacgggtctttgctgccggttggcaacatgccgataccgaagatacccaccagggtgtccagcttgtcggcgatcgccacggctgcaccggtcagggtggtcggcagttcagcgccggcaccgcgtggcatgtactgctcgttcagggccagggccacgtcgtctggctcgccgtcgttgagggcgtagtagtaaccggcaacgccttgcatctccgggaactcgccgaccatttcggtggccaggtcgcacttggacagcaggcctgcacgtgcagcccaggcggaatcaccaccaatgcgtggtgcaatgtaggcggccagcttggaaacccgcacggccttgtcgtacacgctgccgagtttttcctggaacaccacgttctgcaggcgcaggttgaagtcttccagcttctgcttcttgtcttgcttgaagaagaactctgcgtcggtcaggcgcgggcgtacgactttctcgttaccagcgatgatctgctgggggtccttgctctcgatgttggccacggtgatgaagcgcggcagcaacttgccgtccacgtccagcaggcagaagtacttctggttgtcctgcatggtggtgatcagggcttcctgcggcacgtcgaggaaacgctcttcgaacgagcacaccagcggcaccggccattcaaccagcgcggtcacttcgtcgagcaggcttggcggcacgatggcagtgccttcctgcaagcgggccaattcctcagtgcgcttgctgatcagctcgcgacgttcgttggcatccgccagcacataggccgcgcgcaggtcgttgaggtagttggccggcgaagtgatgcgcacggcttctggatggtggaagcggtggccacgggaatcacggccggccttctgggcgaggatggtgcagtcgatgacctggtcaccgagcagcatcaccagccattgggtcggacgtacgaattcttccttgcgtgcaccccagcgcatgcgcttggggatcggcaggtcgttcagcgaatcttcaacgatggtcggcagcaggctggcggtcggcttgccggtgatgacctggctgaaccgcagtttcggcccgctctggtcgatctcactcagttccacgccacacttcttggcgaaacccagggcagcctgggtcgggttgccttcggcgtcgaacgcggcctggcgcggtgggccgtcaaggttgatgctgcggtccggctgctgggtttccagtgcggtcagcaacacggccaggcggcgtggcgcagcgtagacttttttcgcggcgaacttcaggccggcggtttgcaggcccttttcgataccggccatgaacgcatcggccagggtgttcagtgccttgggtggcagctcttcggtgcccagttcaaccaggaaatcttgagcactcattgtgcagcctccagcttagccaacacttcatcacgcaggtccggggttgccatcgggaagcccagcttggcgcgagccagcaggtaggcttgggcgacggaacgcgccagggtgcgtacacgcaggatgtattgctggcgcgcggttaccgagatggcacggcgcgcgtccagcaggttgaaggtatgggacgccttcaacaccatttcatagctcggcaacggcagcggctggtcgagttcgatcaggcgcttggcttcgctttcatagaagtcgaacagttcgaacagcttgtcgacgttggcgtgttcgaagttgtaggtggactgctccacttcgttctggtggaacacatcgccgtaggtgaccttgccgaacgggccgtcagcccacacaaggtcgtagaccgagtccacgccctgcaggtacatggccaggcgctctagaccgtaggtgatttcgccggtcaccgggtagcactcgataccaccggcctgctggaagtaagtgaactgcgtcacttccatgccgttgagccagacttcccagcccaggccccaggcacccagggtcggcgattcccagttgtcttcgacgaaacggatgtcgtggaccaatgggtccaggcccacatgcttgagcgagcccaggtagagttcctggaagttgtccgggttcggcttcaataccacctggaactggtagtagtgctgcagacggttcgggttttcgccgtagcggccgtcagtcgggcgacgactgggctgcacataagcggcgttccaggtttccgggccgatggcccgcaggaatgtagcggtgtggaaagtgccggcgcctacttccatatcgtagggctgaagtaccacacaaccttgctcggcccagtattgctggagggcgaggatcaagtcttggaaggtacgcacggctggcgtaggctggctcacgaaattcacctgttacttgggctgcgatttaaagagcgggagtatacccgattcggccccgccaccactccctggagccttatgccacgctgcttttggtgttctgaagatccgctgtacatggcttatcacgatcaggagtggggaacgccgctgcgcgatgcgcagggtttgttcgagttgcttttgctcgaagggttccaggcgggcctgtcctggatcaccgttttacgcaaacgcgagcattatcggaaggtcttgttcgggtttgatgcgcagcggttggcccaactgagcgacgccgagatcgatgcgctgatgctcgatccgggcatcgtgcgtaatcgcctgaaactcaatgccacccgacgcaatgccgcagcctggctggcgctggaggacccggtgggtttgctctggtccttcgtcggcggcaaacccaaggtcaatcacttcaaggaccgcagcgaagtcccggcgatcacggccgaggccgaagccatgagcaaagccttgaaaaaagccggtttcaccttcgtcgggccgaccatttgctacgccttcatgcaggcctcgggcatggtcatggaccacactcaggactgcgaccgttacgcggacttggtcaacgccggttagaatgcgcgctttgcgcaccacacacgatcaggagtgacctgtggaaaagtttaaaggcgccttgctggtaggcgctctgcggttgtttgcgctgctgccctggcgcgctgtccaggcggttggcacggccatcggctggatcatgtggaaaacccccaaccgctcccgcgacacggtgcggatcaacctctccaagtgcttcccggacatggatccggccgcccgtgaacggctggtcggccagagcctgatggacatcggcaagtccctgaccgaaagcgcctgcgcctggatctggccggcccagcgctccatcgacctggtgcgcgaagtcgaaggcctggaagtgctgcacgaagccctggcctcgggcaaaggcgtggtcggtatcaccagccacctgggtaactgggaagtgctcaaccatttctattgcagccagtgcaagccgatcattttctaccgcccacccaaactcaaggcggtggatgaactgctgcgcaagcagcgcgtgcaactgggcaaccgcgtggcggcttcgaccaaggaaggcatcctcagcgtgatcaaggaagtgcgcaaaggtggccaggtcggaatccctgccgacccggagccggccgaatccgccgggatcttcgtgccgttcttcgccacccaggcgctcaccagcaagttcgtgccgaacatgctcgccggccacaaggcggtgggcgtgttcctgcatgcgctgcggctgccggacggttcaggctacaaggtgattttggaagcggcgccggaagacatgtatagcaccgataccgccacgtcctgcgcggcgatgagcaaggtggtggaacgttacgtcggtgcctacccgagccagtatatgtggagcatgaagcgcttcaagaaacgcccaccgggtgaagagcgctggtactgattcaagatcaacgcaaaaccaatgtgggagggggcttgcccccgagagcggttgctcagtcaaataggtatcgactgacacactgccatcgggggcaagccccctcccacatttgaattgcgctcaggcttggcggtcgagttttttcaggaacacggtcatctctttctcggcctgcttatcgccgtgagcaagcgccgcttcgatgcccttctcccacgccagccgcgccgctgcacgatcttccagccccaactgcgccttgcccaacaacttccacgccgccgaatacttcgggtcgaactcgacgcacttgctaaaatgctccgccgccttggcgttgtccttcagatccagatagcccttgcccaaaccaaagcgcagcagtgagttatccacgcccttggcgagcattttttccagggattcgagcatgtcggccactccgttcgatcagaaaaaactcaaccccacgtggaacaacttctccacatcgcgaatatgtttcttgtccaccaggaacagaatcacatggtcacccgtggcgatcaccgtatcgtcatgggcgatgatcacctcttcgtcacggatgatcgcgccaatggtggtgcccggcggcaagccgatatcgcggatggccttgccgatcaccttgctcgacttcgagtcaccgtgggcaatcgcctcgatggcttccgccgcgccccggcgcagggagtgcacgctgacgatatcgccacggcgcacgtgggcgagcaaggtgccgatggtcgccagttgcgggctgatggcgatgtcaatatcgccgccctggatcaggtccacgtaggccgggttgttgatgatggtcatcaccttcttagcccccagccgcttggccagcagcgacgacatgatgttggcttcgtcatcgttggtcagcgccaggaagatgtcggcgtcggcgatgttttcttccatcagcaggtcgcggtccgaggcgctgccttgaagtacgacggtgctgtccagggtgtcggacaaatgccggcaacgtgccgggctcatctcgatgatcttcacctggtagcggctttcgatggcttcggccagacgctcgccgatctgcccgccgccggcgatgacgatgcgcttgtaggtctcatcgagacggcgcatttcgctcatgaccgcgcgaatattcgccttggcggcgatgaaaaacacttcgtcgtcggcctcgatcaccgtatcgccctggggcaggatcggccggtcacgccggaaaatcgccgcgacgcgggtttccacattcggcatgtgctcgcgcagctggcgcagttgctggcccaccagcgggccgccgtaataggcctttaccgcgaccagttgcgccttgccgccggcaaagtcgatcacttgcaaggcgcctggaatttcgatcaggcgcttgatgtagtgggtcactacctgttccgggctgatcagtacgtcgacgggaatcgcgtcgttgtcgaacagcccggcacgggtcaggtaggccgcttcgcgtacgcgggcgatcttggtcggggtgtggaacagggtgtgggcgacctggcaggcgaccatgttggtttcgtcgctgttggtcacggccaccagcatgtcggcgtcatccgcgccggcctggcgcagtacggtcgggaacgacgcgcggccttgcacggtacggatgtcgaggcggtcgccaaggttgcgcaggcgctcggcatcggtgtcgaccacggtgatgtcgttggcttcgctggccaaatgttcggccaacgtaccgccaacctgccctgccccaaggatgatgattttcatccggtcactcccttaaaaccattcagccgcgcgcggcggcgatcttgatcagtttggcgtagtagaagccatcgtgtccgccttcttgcgcgagcaactggcggccgtggggctgcttgatgccggccgtggtggcgaggtccagctcccgtgcaccgctggtgcgggcgaggaaggcttcgatcacctcggtgttttccgtcggcaaggtggagcaggtggcatagagcaggatgccgccgacttcgagggtcggccaaatcgcgtcgagcagctcgccctgcagcacggccagggcggcgatgtcatcggtttggcgggtgagcttgatgtccggatggcgacggatcacgccggtggcggagcacggtgcgtcgagcaggatgcgctggaacggtttgccatcccaccaggtggcggtgtcacggccatcggcggcgatcagctcggcgttgaggcccaggcgggcaaggttttcccgtacgcgcaccaggcgtttggcttcgaggtcgacagcgacgacaccggccaggtctttttcgacttccagtatgtgacaggtcttgccgcccggcgcgcagcaggcgtcgagtacgcgttggcccggcgccaggtcgagcaggtcggccgccagttgcgccgcctcatcctgcacgctgatccagccttcggcaaagcctggcaggctgcgcacatcggtggccgcttccagtacgatgccgtcgatgctgtatacgcacggtgtggcgttgaagccggcgtcggtgagcaatttcaggtaggcatcacggctgtggtggcggcggttgacccgcaggatcatcggtggatgcgcattgttcgccgcgcagatggcttcccactgttcgggccagaacgccttcagggatttttgcagccagcgcgggtgggcggtgcgcaccaccgggtcatgttccagctcggccagcagcgcttcgctttcgcgctgggcgcggcgcagcacagcgttgagcagggccttggcccacggctttttcagtttgtcggcgcaaccgactgtctcgcctatcgcggcgtgggcgggtacacgggtgtagagcaactgatagaggcccaccagcagcagcgcttccacatctgcatcggcggccttgaacggcttttgcagcaacttggctgccagtgcggacaagcgtggctgccagcgggcggtgccaaaggccaggtcctgggtgaaaccgcgatcgcggtcttcgaccttgtccagctgggtcggcaacgaactgttcagcgacgccttgccgttgaggacggcggcgagagccttggcggcggctagacgtgggttcattgggctgtcccgaggagggtgcctatagcaaatttctcacgacggctgttgaacaaatcgctgaaattaagcgctttgccaccgggtaattgcagacgggtcaggcacagcgcctgctcgccgcaggcgaccagcaggccgtccttgctggcgccgatgatctcgccgggagcgcctttgccctcgacgagtttagcggccaacactttcacggcttcgccattgagggtgctgtggcagaccggccaggggttgaaggcacgtaccaggcgctccagctccacggccgggcggctccagtcgacgcgcgcttcgtctttgttcagcttgtgggcgtaggtggccaggctgtcgtcttggacttcgcctgccagggtgccggcggccaggccggcgatggcctcgatcacggcgggcgggcccagctcggcgaggcggtcgtgcaggctgccgccggtgtcttcgccggtgatcggggtggtgaccttgagcagcatcgggccggtgtccaagcccgcctccatgagcatcacggtcacgccgctttcgctgtcgccggcttccaccgcgcgctggatcggcgccgcaccgcgccagcgtggcagcagcgaggcatggctgttgatgcagcccaggcgcgggatatccagcaccccttgcggcaggatcaagccgtaggccacgaccaccaacaggtccggcttcagcgccgccagttccgcctgggcgtcggcgttgcgcagggttggcggttgcagcacggggatgttgtgctccagcgccagttgcttgaccgggcttggcatcagtttttgcccgcgaccggccgggcgatccggctgggtgtacaccgcgacgatgtcataagggctggcaagcagggccttgaggtgttcggcggcaaattctggagtgccggcaaaaacaatgcgcagtggctcggtcatgggaggtctcggttaaaagcagtcacaaaagaaaaaggcttgccgcagcaagcctttggaagaagggcatcaagcttgctggcgatgctttttttccagcttcttcttgatccggtcgcgcttgagcgtggacaggtaatcgacaaacagcttgccgttgaggtggtcgcattcgtgctggatgcacaccgccagcaggccttcggcgatcagctcgaacggcttgccgtcacggtccagggccttgatcttcacgcgcagcgggcgctcgacgttctcgtagaactcgggcaccgacaggcagccttcctggtactcacccatctcgtcggtcagtggttcgaactctgggttgatgtacaccctcggttcgctgcgatcctccgacaggtccatgaccacgacgcgctgatgcacgttgacctgggtcgcggcgaggccgatgcccggggcttcatacattgtttcaaacatgtcatcgaccaactgacgaaccttgtcgtccactacggccaccggcttggcgatcgtgcgcaggcgcgagtcgggaaattcgaggatgtttaaaatagccataagcgtaattgctgcacatgtgaggtaaaggcaaatcggcgttgggatggacccagacagccggtgtgaaacgccccgaagccgcgaaggccctggcatttcacgcgaacgcacataataaaggagattcaccccatgaggaaatcgctactcgtcttgctgctgtgggccccgttcgccatggccctgctgccccagcccgtccagcgcctggatcaatcgacacaacaggccatccagcgctttttactgcacaaccgcattcttgattcgccacaggacctggacagcgcgccgtacattgttgccgctgatgcaggtcgagtgctgggggccaacggtgagcgggtgcatgccaggggcaacctggacccttcccaaccccattacggaatattccgacgcggcaaggcctacaccgatccgcagacccaagaactactgggcatcaacgccgacgatatcggcacggcccgtttcgtcacggctggcgacctcaccaccctggccgtgcagcgagtgacccaggaggtgcgcccgggtgaccgcctgctacgcgcgcaatctcctgtcgatccggccacccttgaggtcatttcagcggcacccttcatcgacgggcacatcatcgatgtccccaagggtgtcacccaaatcggcgtactcgatgctgtcatcctgaacaaaggccgccgtgacggcctggtcgaaggtcaactgctcagcgtgatcaaggctggcgcgaccgtgcgcgacagcctcaccggcacgccgacccgactccccgatgaacgcgccggcaccctgctggtatttcgcacctacgaaaagctcagttacggcctgatcctcaatgcctcgcgacccctggcagtgatggaccgtttcgagactgcgcatcaaacacaatgaataggttgctaaataagttaccaacagagttatccacagcttgttccggtcaaggatgatcaaatgaatccgataaacagtcatgaagtatccccgtcagaactggaagcccgactacgcttgcacaggctgccggaactgggccccaagcgttttcgcttattgatcgaagcgttcggctctgcgtcaaaggccatcagtgcccccgccagtgcctggcgttcgctggggttgccggccatcagcgccgatgcccggcgcagccatgaaatccgcgagggcgccagtgcggcattggcctggctggcttgcccagcccagcatttgctgatgtgggaccagccggagtaccccgcactgctcgcccagattgacgacgcaccgccgctgttattcgtcgctggtgaccctctgatcctggaaaaaccgcaactggcgatggtgggcagccgacgtgcatcccgtcctggcatggacaccgcagctgcgttttcccgtagcttggcgagcgcgggttttgtcatcaccagtggcctggccttgggtattgacggcgccgcccatcaagccgcattggacgtgggcggccagacaatcggcgtcctcggcaccgggctcgaaaatttttatccacagcgccaccgacggctggcggcggcgatgattgaccaaggcagcgcggtggtttccgagtttccgctggacgctccaccccaggccggcaacttccctaggcgtaaccgcatcatcagtggtctgtcccttggcgtattggtggtggaagccagcatggccagcggctcgctgatcaccgcaaaactggcggccgagcagggacgcgaggtgtacgcgattccgggctccatccatcatcccggcgccaagggttgccatcagttgatccgcgatggtgcggtgttggtggaaaccatcgagcacattcttgaaggcttgcgcggctggcaggcgctgtcccgtccggcgccgatgccggtgacccatccgctggtggcactgctgcatgcggcgccgcacaccagtgaagcgctggcgattgccagcgggcggccgttgtcccaggtgttggcgacgcttacggagctggagcttgagggccaggttatctgcgaaagcgggcgctggcttgcgcgctgctaggttttgtaacgaagatcggtaaactgcgcagagctttagtctggagagtgaataatggtcaaccggtggcgtgtgctggaaaccgcacgagaaattcgcgcaggcgcggtgattgcctacccaaccgaagcggtttggggcctgggctgcgacccgtggaacgaagaagcagtagaccgcttgctcgccatcaagaatcgctcggtggacaagggcctgatcctggtggcggacagcatccgtcagttcgactttctcttcgaagacttcccacaggattggatcgaccgcatggccgccacctggcccgggccgaatacctggctggtgccccatcaggacttgctgccggaatgggtgacgggtgtgcatgacacggtggcgctgcgggtgactgaccatccactggtgcgggacttgtgctcgctggtggggccgttgatttccacctcggccaaccctcagggtcgcccggctgcacgtacgcggatacgcgtggagcaatacttccgtggccaggtggacctggtgttgggcggcgccctgggtgggcgcaaaaaccccagcctgattcgtgacctggtgaccggcgaggttgtgcggccttcctgaaggaaggccacagggctgcttaaggcagcagaatggtcgaccccgtcgtgcggcgtgccgataactcggtctgcgccttggccgcttctgccagcgagtaccgctggttgatatcaatgcgcaccttgccgctcttgatcatcgagaacaggtcatcggccatcgcctgcaggttctgcgggttgttggcataggtcgccagggtcggccgggtgacatacagcgagcccttggctgacaggatccccaggttcaccccatccaccgcgcccgacgcattgccgaagctcaccaccaacccacggggcgccacgctgtccagcgaggtcagccaggtgtccttgccaacaccgtcatacaccaccggtacctttttgccgtcggtcaattccagcacacgctgtgcgacgttttccttgctgtagtcgatggtttcccaggcgccgagggatttggccagggcggccttttccggcgagctcaccgtaccgatcagcttcacgcccaaagccttggcccactggcacgccagggagcccacaccaccggctgcggcgtggaacaggatggtttcaccgcctttgagttcataggtctggcgcagcagatactgcacggtcaggcccttgagcatggcgccggcggcctgttcgaagctgatgtcgtccggcaggtgcaccaggttggcggcgggcaacacatgcagttggctgtaggcgcccagcgggccactgccgtaggccacgcggtcgccgaccttgaattgggtgacttcactgccgatggcatcgaccacaccggcgccttccgcgcccagccccgatggcaaggccggcggcgcgtacaggccgctgcggaaataggtgtcgatgaagttcaggccgatcgcctcgttgcgcacgcgaacctgttgtgggccaggctcggccggcgtgtagtccacatactcaagcacttcggggccgccatgggcgctgaactggatacgtttggccatctgcacttctccttaaggtcgaatcgcgtagccccctatcggactcctaagcttgatcttcgtcaactgcgacgtacgtgggtgcggtggtatcctgtgcgcccatttgccgccgacgcccaatggcctcgcgtagctttgcccgattcaaggtgatgccatgactacccgcaccgaggctgtaaaggcctacctgcttgacctgcaagaccgtatttgcagcgccctggaaaccttcgagacggacactcgctttatcgaagacgcctggacccggcctgccggcggcggcggtcgcacccgtgtgattgcaaacggttctgtcatcgaaaaaggcggcgttaacttttcccacgtctttggcagcggcctgccaccgtctgccagcgcgcatcggcctgagctggccggtcgcggtttcgaggccctgggtgtgtcgctggtgatccacccgcataaccctcatgtgccgacttcccacgccaacgtgcgctttttcatcgcagagaaagaaggcgaagagccggtgtggtggttcggcggtggcttcgacctcacgccttactacggcaacgaagaagactgcatccactggcaccgcgtggccgagcaggcctgcgcgccgttcggtcctgaggtgtattcgcgctacaaagcgtggtgcgacacttacttccacatcaagcaccgcaatgaaccgcgtggtatcggcggcctgtttttcgatgacctgaacgagtgggacttcgacacctgcttcgccttcatccgtgccatcggtgatgcctacatcgacgcctacctgccgatcgtgcagcgccgcaaggccattgcctacaccgagcaacagcgcgaattccaggaattccgccggggccgctacgttgaattcaacctggtctacgaccgtggcaccttgttcggcctgcaatcgggcgggcgtaccgagtcgatcctgatgtcgctgccgccgcaagtgcgctggagctacgactggaaggccgaggccggcagcgaagaagcacgcctcactgactacttcctgcaagaccgtgactggctgggccttgccgcgcccaaggcggttgtgtgatggaccgctatgtcgtgttcggcaaccccatcggccacagcaagtcgccgctgatccaccgcatgttcgccgagcagaccggcgagcaactggactacagcaccttgctggcgccgttggaggattttaccggctgtgcccgtgagttctttcggcagggccgtggcgccaacgtcacggtaccgttcaaagaggacgcctaccgactggccgacaccctcaccgaacgtgcccaacgcgccggcgcggtgaacaccttgagcaagctggcagacggcagcctgttgggcgacaacaccgatggcgccggcctggttcgcgaccttatcgtcaacgccgggttgagcctgcaaggcaaacgtatcctgctgctgggcgcgggtggcgcggtgcgtggcgcgttggaaccgttgctggctgagcaacccgcctcgctgatcatcgccaaccgcaccgtggaaaaggccgaactgctcgccgagctgttcgacgacctcggcccggtatccgccagcggtttcgactggctgcgtgagccggtggacgtgatcatcaacgccacgtccgccagcctgtcaggcgatgtaccgccgattgcgggcagcctgatcgagccaggcaagaccttttgctacgacatgatgtacgccaaggagccgaccgcgttctgccgttgggcgactgagcaaggtgcatccgtggcgatggatggcctgggcatgctggtggaacaggcggcggaagccttcttcctgtggcgcggcgtgcgcccggattcggcgcctgtattggctgaacttcgccgccagttgatctgacacggatccaaatgtgggagggggcttgccccctcccacattgttgatcgttttcagtcttggaactggatggggcaattgtcggccccttccagctttctcaactcttccaccacctgcggtctggcccggcgcagcgtcaaactgcgccctaacccacgcaagcgccgagcctcctggtgcagcatctccacccctgaatagtcgataaagttgatctgctgcgcctcgatcaccacgcgctcgccctgcagactttgcaggcgcacttgcaggtaatggctggccccgaaaaagatcgagccgcccacccgcagtacatcctcatcgccgtctcgccactgttgtacccgtggctgggaggtgcgcttgaggtagaaaaacagcgacgccagcaccccggcataaatcgccgtttgcagttccagcagcaaggtggccacacaggtcaggctcatcaccacaaactcggcgcgactgacgcgaaacaacgcccgaataccgcgacggtccaccagcccccaactgatcagcaggatgctcgcggccatgctcgggatcggaatgtgggcgatcagcgctgcgccaaataacgcgaacaatgccacccacaacgcggaaaacaccccggccaacggcgagcacgcgcccgcctcgtagctgaggccggagcgggtgaacgaaccggcggacaagtagccggagaaaaatccgcccgcgatattggatagaccctgcgcacggacttcctggttggcgtcgagcaattgctgtgagcgcgccgacaacgagcgggcaatcgacaggctggttaccaacccgagcatgcccaccgccacggcactcggcagcaggcgcaggagcaggtccaggtccatcggcagcgggctgaacggcggcagtttgccgacaaacgaactgaccagcgctacgtgcccgaacatcgccggccacagccacgccaccaggctgcccagtgccagcgcaatcaacagcgttggccagcgaggcaccaggtatttgagcagcgcgccgaccagcaacgtgccaagccctagcaggagggacgcatggtcccattcgccgctgtgatggatcagcgccaacaggctattgatggcggtggcctggcttggcagatccagccccaacaggttgggcaactggccgagggcgatcaccacggcggcgcccagggtgaagccgagcaccaccgagtgggagacaaagttcaccaacgcgccgaagcgcaacatgcccaacagccactggaaaacgccggcgaggaaggtcagcagcaggatcagggtgatgtagtcctgtgaccccggcacggccaatggactgacgctggcgtacagcacaatggaaatcgccgccgtgggcccgcagatcaagtgccaggacgagccccagaggcaagcgatcagtaccgggatgatcgcggcgtacaggccgtattcgggtgggagaccagcgatcagcgcgtaggcaattgactgtggcagggcgaggactgcgccgctgaggccgacgattgcatcccgaccgacgctggcgcgggtctggcgcgggagccaggcgaggaaggggaacagtgattggcggttgggccggggcatcgcagactcggtttagaggtttggcacagaatatcagtacacatcggttcctgtgggagggggcaagccccctcccacatttgaattgcatcaggcctcagagtctggctttaactgcagggagtgcgtctttgccgtccagtgtttttacaccctccagccacttatccaataccgccggattggccttgatccacgccttcgccgcatcggcattgctgactttgttgttggccacctcggccatgatgccgttctccatctcctgggtaaaactcaggttggtcagcagttttcctacgttcgggcaggcctgtgcgtaacccttgcgggtcaaggtatacacgctgccagtgtcaccaaagtatttctcgccacccttgaggtagcgcattttcaactgcacgttcatcgggtgtggggtccagccgaggaaggtgacgaatttctgtttcttcaccgctcgcgacacttcggccagcatcgcctgttcgctggactcgaccagcttccactggctcaggtcgaagtcgttcttcttgatgatttcctgcaacgagatattcgccggcgcgccggagccgatgccgtagatcttcttgtcgaacttgtcggcaaacttgttcaggtcggcaaaatcatgcaccccggcgtcccacacatagtccggcacggcgagggtgaactcggtgccgtcgaggtttttcgccaactgcaccacatcgccattggccacgaacttgtcgtagaagccctgctgcgccggcatccagttgccgaggaacacatccacctggccgtccttgagcccgccaaaggtgatcggcaccgccagggtgtccaccttcggtttgtagcccatgccggtcagcaggaaaccggtgatggcgttggtggctgcgatatcgctccagcccgggtcggccatttttaccgtttcacaactggcgtccgcgtacacgttggcgctggtcagtaccaacaggctcaacatcacagtcaacttttgcatggccttccctctgtatttattggttttggcagggttgtggaaaacgtgccttgcgctccaggtcgtcgaggtcgatatggttgcgcatgtattgctgactggcgtccaccagtggctggtgatcccagctcttcagcttgccctgggtgagtgcctcgaataccaggcgacgacggcgttggctggcgagcacctgttggtggatcgccgggatgtcccatttggcccgcgcctcagttaaaaacgcctcgaacagtggccggtgttccggtgactggctgaggttctcccgctcgtgcgggtcgttgtgcacatcgaacagtagacaagggtcgtcttcgctgtagatgaatttgtaggcgcctcggcgaatcatcatcagcgggctgatagtgccttcggccatgtattcgccgaacacttcgtcgtgcccgccctgcccttgcaagtgcggtaccagcgagcggccgtccagcggcaggcgtgggtcgagctcgccgccggccagttccaccagggtcggtagcaggtcggcggtggacacggcgtgggtcacgcggcccgccgcgaattgccccggcgcgctgatcaatagcggtacgcgggcggccatttcgaaccagtgcattttgtaccagagcccgcgctcgccgagcatgtcaccgtggtcgccagagaaaatgatgatggtgtcatcggccaagccggtgtcttccagggtctgcaggagcttgccgacattgctgtcgatgtagctgcacgcgccaaagtaggcacggcgcgcatcgcggatcttatccaccggcagcggcttgtcccacaggtcgtagaccttgagcaggcgctgggagtgggggtcgagatcgctttgcgcgggtgttgtaggcaacgggatatcagcgtcgtcgtacaggtcccagaacggcttgggaatggtgtacgggtcgtgcgggtgggtcatcgacaccgtcaggcagaacggttgttcgccgtcttcgcggatatggtcgaacaggtattgctgagccttgaagaccacctcttcgtcgaaatccagctggtttgtgcgcacgcacgggccggcttgcagcaccgacgacatattgtggtaccagctggggcgtacgtccggctcgtcccagttcaccgcccagccatagtcggcggggtagatatcgctggtcaggcgttcttcgtaaccgtgcagttggtcggggccgcagaagtgcatcttgcccgacagcgcggtgcggtagccgaggcggcgcaggtagtgggcgtaggtcggtacatcggcggggaaatcggcggcgttgtcgtaggcgccgatcttgctcggcaactggccgctgaccagggtgaagcgcgacggtgcgcacagcgggctgttgcagtacgcggcatcgaacaccacaccctgttcggcgaggcggctcaggttgggcaatttgatcggggaaggtccgtagaacggcagcatcggcgcggccatttgatcggccatgatgaaaagaatgttcttgcgcttcatgatctatcggcattccataggcggtgtttatgcgaatgagcatgcagcccatgaaaagtggggtaaagcccatgaaaagcaatgtctaggataagcaccgcttatgtatgaagcccttggcgacctgtccctcgatctgctgcgcgcgttcgaagcggcggcacgccaccgcagttttaccgccgctgcaatggaactgggcaccacccagcccgcgatcagccagcagatcaagcgcctggaagagcaactggcgatccgcctgtttgatcgcatctaccgtggcattgagttgaccgatgccggcgccctgttgttcgagcatgtgcagggcggtttgcagggcatcaaccagggactgagcctgatcagccagcaggatcagcatgaagtgctgcaagtagccaccgacttcgccttcgccgcctattggctgatgccgcgtttgcaccgcttccaccaggccaacccccaggtggacgtcagcctggtgaccagcgagcgcaaccacgcgaccttgcgcagcgatatcgacgtggcggtgctgtttggcgacggccgtttcaagcagggcgacagcctgtggctgttcaacgaggaagtgttcccggtgtgcagcccgcaatggctgaaggcgcaggccacgccgctgactgtacaaaatctgcatgattttccgctgctgcacctgcgccaggaaaacaacagccagtggttcgactggagcggcgtgtttcgcgaactgggcatcaccaccgcgcccacccccggccagttgcgcttcgataactacaccctgttgatccaggctgcgattgccggccagggcgtggccatcggctggcgccatctggtggacaacctgctggaacagaactggctgtgccggccggtgagcgacacggtgatctcacgtttcggctattacgtggtgcaaccccagcgcaaacgccgagggcagttggtggagcgtttcgtcgactggctggtggccgagcaggccagcagcgcacagtcactgaccgggctggccctgccgtcgattgcggtctagcatctggcgcatattggatccggagctcgtcatgcaacgtatcaagggctatcacgcccatatctacttcgacgcgaacactatcgaacaggcgcgcaccttgtgcgaagacgccgccaaactgttcccgctgcgcatgggccgtgtgcaccaacggccggtagggccgcacccggactggagctgccagttggcgttcgacccggaatacatcggtgtggtgctgccgtggctggtgatccatcgtaatggcctggtggtgttcctgcaccccgataccggcgatgacctgaaggaccacacggactatgccgtctggatgggggcgatgcgggagctgaacttgtcagccttttcttaaagttcatccctaaatatgggatagacatttatatattgagactttctgcttcgtaggtttatattcgctgcatccgctcagaactcaggtgaagcgatgcaggcgcaattgatcgcgctcgattggggaaccagctcccttcgtgcttataaactcggccccgctggcgcagtgctggaacagcgctcgctggcgtggggcatcatgcatttgcccaatgaaccccgggacattgctggcgtgcgttgcagcgatggcttcgagttggcgttcgatgcggcgtgtggtgactggctcgacgccgagcccggtttgccggtgattgcctgcggcatggttggcagcgcgcagggctggagcgaagcggcttatcgcaatacccctgtcgatgtcgccagcctcggccaggcgctgcataaggtgcgcagcctgcgtggcgtggacgtgcatatcgtgccgggcgtgatcgagcaggtcggcttgcccaacgtgatgcgcggcgaagaaacccaggtgctgggcgtgttgcaggggctgggcaccgacgcattgatcggcctgcccggcagccattccaagtgggtggaggtggtcgatggctgcatcacccacttcgacaccttcatgaccggcgagctgtttgcggtgttgagcaagcacagcatcctcggacgtacccagcaacaatccgcacaattccaggccgacgcctttgaccgaggcgtgcaggtggcgctgtccaaagacggccagcgcggcgtgctgtcgacgctgttcagtgcgcgcaccctgggcctcaccgccgaactcagccccgaacagcagcccgattacctctccggcttgctcatcggccacgaactcgccggcctgcccggcagtgcccgacacaagccgatcatcctggtcggcgccgggcccctctgcgcccgctatcaacgcgccctcgccctctgcggtttcgcccacgtcagcctggcgcaagaagccaccgagcgcgggctgtggcaattggcgatggcgtccgggctcactcaacctgtattggaggcctgacatgctcaagcacgcactcgcgcaaaacggtttgatcgccatcctgcgtggcattcgcccggacgaagccgaggccgtcggccaagtgctgtacgaggcagggtttcgggtgatcgaagtcccgctgaactcgcccgacccttacaccagcatccgcaccctgcgcgacagcctgcccgccgattgcctgatcggcgccggcacggtgttgctgcctgagcaggtcgagcaggtgaaggcggccggtggccaggtgatcgtgatgccccacagcgatgccaaggtgctgcgagcggcgaaagccgcaggcctgttcctgtcgccaggtgtggcgacaccgaccgaagccttcgccgcactggccgagggggctgatgtgttgaaactgttccccgccgagcaaatgggcccggcggtgatcaaagcgtggctggcagtcttgccggctggcaccttgctgctgccggtcggtggcattaccccggacaacatgcaggtgtttatcgatgccggtgccaaagggttcgggctgggttccgggttgttcaaaccgggtatgacagtggatcaggtagcgagccgtgcccaggcttatgtcgccgcctggaaagccctgagctgacatcaagttccgcgcccttggcgccgcatctataagagagacaagagatgaaaattaccaaactgacgacctttatcgtcccgccgcgctggtgcttcctcaaggtcgagaccgaccagggcgtgaccggctggggtgagcccgtggtcgaaggccgcgcccataccgtggcggctgccgtcgaagagctgtccgattacctgatcggcaaagacccgcgcaatatcgaagacatctggaccgtgctctatcgcggcggcttctatcgcggcggtgcggtgcacatgagcgccctcgccggtatcgaccaggcgctgtgggacatcaagggcaaggccctcggtgtgtctgtcagtgatctgctgggtggccaagtgcgcgacaagatccgcgtgtactcgtggatcggtggcgatcgcccggccgacaccgcccgcgccgccaaagaggccgtggcccgaggctttaccgcagtgaagatgaatggcaccgaagaactgcagttcgtcgacagcttcgagaaagttgacctggccctggccaacgtcgccgccgtgcgcgatgcggtcggcccgaacgtcggcatcggcgtcgacttccatggtcgggtgcacaagccgatggccaaggtgctgatgaaagagctggacccgtacaaactgatgttcatcgaagagccggtgctcagcgaaaactacgaggcgctcaaagagctcgcgccgctgaccagcacgccgattgccctgggcgagcgcctgttctcgcgctgggacttcaagcgtgtgctcagcgaaggctacgtggacatcatccagcccgatgcttcccacgcgggcggcatcaccgaaacccgcaagatcgccaacatggccgaggcctacgacgtggccctggccctgcactgcccgctgggcccgattgccctggcggcatgcctgcaactggatgcggtctgctacaacgcgtttatccaggagcagagcctgggcattcactacaacgagagcaacgacctgctcgactatgtgcgcgaccccggcgtgttcgactatgaccagggcttcgtgaagatccccaacgggccgggcctgggcatcgagatcaacgaagaatacgtgatcgagcgcgcggccatcggccaccgctggcgcaacccgatctggcggcatgccgacggcagcttcgccgagtggtaagcaccctgtaggagccgggatgccggctcctgcaagccctcaataaacataagaagaggcaacccccatgcaccctgaatccttcaccgggcaggcttctttagtcacgcctaccaaaaagcgttttttcatcatggtgctgttgttcatcaccgtggtgatcaattacctcgaccgcagcaacctgtcgattgccgccccggcgctgaccagcgaactgggcatcgacccggttcaggtcgggctgatcttctccgcgttcggctggacctacgcagccatgcagatccctggcggctggctggtggaccgcgtgccgccgcgcattctctatacggctgcgctgatcctgtggtccatcgccaccgtgatgctaggtttcgctgccagctttatcgcgttgttcgtgctacgcatggcggtgggtgccctggaagccccggcgtatccgatcaacagccgcgtggtgaccacctggtttcccgagcgcgaacgcgccacggcgattggcttctatacctccgggcagtttgtcgggctggcgttcctcacgccggtactggcctggctgcaacatgctttcggctggcacatggtgtttgtcgttaccggtggcgttggcatcctgtgggggatcatctggtacgcggtgtaccgcgagcccaaggacttcaaaggcgccaacgctgctgaaatcgagctgatccgcgaaggcggtggcctggtggacatgcaggaaaaagccgccaaggcaccgttcagttgggtcgacctggggatcgtgctgagcaagcgcaaactctggggcatctacctggggcagttctgcctgaactccacgctgtggttcttcctgacgtggtttcccacctacctggtgaaatatcgcggcatggacttcatcaaatccggcctgctggcatcgttgccgttcctcgcggcgtttgtcggcgtgctgtgttccgggatcttttccgattggctgattcgtcgcggcgcatcggtggggtttgcgcgcaagttgccgatcattggcgggttgctgatctccacggcgatcatcggtgccaactatgtggactcgacggcctgggtgattgcgttcctggcggtggcgttctttggcaatggcctggcgtcgattacctggtcgctggtgtcgaccctggcaccggcccgcctgttggggctgaccggtggggtgttcaacttcatcggcaacctgtcggcgattgccacgccgattgtgatcggctttttggccagtggcgattcgtttgcgccagcgattacctacatcgcggtgctggccttgctcggagcgctctcttacgtgttgctggtgggtaaggtcgagcggatcgagttgtaaaaaagggcgaccttgcggtcgccctttttcctttcggctcagggcaccgacatctcgttacggaacacattcagcgggtcccagcgctgcttggtgcggcgcaggcggctttcaatcatgaggtcagggaagaacaccttgtaccactgcgggttgggccccttgttggggtcgccgtcgataaacagcatgtcgcggtcggggtaattgatgtagcacccttcgaactgggcattgaccggaacgccgttgtcgttggcaaatgccgcgaaaaacagtccctggatccattgcgcgtgggcttgatccgaagcgctgctttcgtcacgccagtagcattgtggttgccacttcaagtaggacgaacgctgtgcaaccgatgattcccgtcgcacggcggcgctggcctgattgatttgcccaccgaatgactggatctggatcaggctttgagtcagccgcttatcggggtcgtcccacgtcagcgtgtcccagatcgcctgcagcacagtgggggtgaaaatacccttctggtaggccgacttgtaccgaccacgctggtttggccctgagccattgagcgtctgctggcaatgcagccaatccattcgacgcgtcgcggccagggcagacgccagtgaattgatcgtcggccctggcgggttgctgcgtggcaggtgggtcgttggggaaggactcaggcattcggtagcggaaatgccgatggcattgagcatcgagctgacaaagtcctcaaagggggcttgatcattcaactcgccctgcttgtccacgtaatgaacatccatcgtgacgttgccagtgttctgatggcgcatctccagtttggttgccaggccccaggtgtccgggtttgcctggttgcgggcaaaccagtcctgataggccaccagcaatctgtcgagggctggcttggtcagcagcgaccagtcccactccagcaccagccacagcacttccttgggggcttggggcaaacgttcgaagtagtagctggtaataatcccgaactgcccgccgcctgcgccgcagcaggcggcgaacagatccagttcgtcctgttgggcgctgttgcgggcgacatgtacagggaccaggccgttgccttgggcgttcggcaccagcatgtcgacgccactcaaccaatcgcacaccaggccatccttgcgcgacagcagcccgtagccaccgccgcaaatatgcccacccagcccgaccgaatagcacgagccgccgggcaagctcgtgttggccagcttgtacagcgccacataggcatcccagttctggccgcccgcctccaggcgatagctgtagcgatgaggcgaggtgggcaccaactccgaggcaatctgccccgtggcgtcgtagaccacttggttgagttggctgatatccaggatcgagagcacttcgtcgggactgtcgggcatcttgttcgcgacaaagccttcatagcagtgaccgccgctacgcaccgtgatccggccattggggatcgccagcgcctgggcggcggcgtcgatgatgtcctgggggctatagcagaggtaaatcaagttggcgccacttgacgaagattcaccctgcacattgcccaatggccagcgcaggttgaaacctttttgcagtgttgaatgacgacggtccgcagcggtaaggagatcaaatgccatgatgtactccaaagagccaagaatgacttctgatgcggctaacttaacgaccgggagggcaaggaatgcggggcttgcgcaggcggttagacggcaataggcatgaagtgcgttgagggaggacgcaatgtccaccctcaagcctagcggaaaaaggtgaaggcgccggggggttagttgagtacgccgtcgaggatctcgtagacgatgcccgtgcccaccgcgatcagcaccacatccggccccgaacggcgccactcataacccgggtacaccggcaggcgcgcgagggcgcggttgtctaggcgttcgccgtagtaaccacggggcaacggctggccacgtaccaggcgtacattgggcggcggcggtgcgccacgggagaactggccgtggttgtcatggatgatctggcgtaccgggccgaagtcctggggcgggccgccgcgacggttgtcctgcgggccgcgatggtcgtcgccatgttgctcgtgctggccttgcgggccgccacggtcggggccgccttggtcataaggcgcggcttgcaccagcgcgctggcgccaagcaccagtacgccaaggcctgcaatcacggatttgggcattttcatcgggtattcctcagggcacgcaaacaaaaaagggacttcgaacgaggttcgaaatcccttggtcttgctgtttaggccgtgcccgcgcgggttgattcctctgtatcaggaactttacctactgcttacggggcccttacttacgggcgttacgcacgccttccgacaatgccgcacacaggctcaacacgccgtcgatggcttgctggtcattcttggcattggcaatgtgatcgatcagcgccgaacccaccaccacaccgtcggccaggcgggcgatggccgccgcttgttccggtgtacggataccaaaaccgatgctgatcggcaggtcggtgtggcgacgcaggcgggtcacggcttcttcgacgtgttccagggtcgccgcgccggcaccggtcacgccggcgaccgacacgtagtacacgaagccggagctgccgttgagcacagtgggcaggcgcacatcgtcggtggtcggggtggtcaggcggataaagtcgatgcctgcggcctgggccgggtcgcacagctcgccgttatgctcgggcggcatgtcgaccacgatcaggccgtccaccccggcttccttggcgtcggcgatgaactgcggcacgccgtatttgtggatcgggttgaagtagcccatcaacaccagcggcgtgtcgttgttgtccttacggaactcgcggaccatctgcagggttttcaccaggttctgcttggcattcaacgcacggatgttggccagctgaatggccgggccgtccgccatcggatcggtgaagggcatgcccaactcgatcacatcggcaccggcggctggcaggcccttgaggatctccagggaggtgtcatagccagggtcgccagcggtgacgaaggtcaccagggcggcgcggttttgttctttcaactgagcgaagcgggtgtgcaggcggctcatcagtgtttctcctgctgggactgttccatatggtgcatgacggtctgcatgtctttgtcgccacggcccgacagattcaccaccatcagatgatccttcggcagggtcggggcgcgcttgaacacttcggccagggcgtgggcgctttccagggctggaatgatcccttccaggcggcagcatttgtggaaggcgtcgagggcttcgtcatcggtcaccgaggtgtactggacgcggccgatgtcatgcaaccaggcgtgttccgggccgatgccggggtaatccaggccggcagaaatcgagtgggcgtcgatgatctggccatcgtcgtcctgcagcaggaaagtgcggttgccgtgcagtacgcccggtacgccaccgttgaggctggcagcgtgcttgccggtctcgatgccgtggccggccgcttcaacgccgatgatctccacgctggtgtcatccaggaacgggtggaacaggcccatggcgttggagccaccgccgatgcatgccaccaggctgtccggcaggcggccttcctgggcttgcagttggtcgcgggtttccttgccgatcacggcctggaagtcgcgcaccatggctgggtacgggtgcgggccggccacggtgccgatcaggtagaaggtgctgtcgacgttggtcacccagtcacgcagggcttcgttcatcgcgtccttgagggtgccggtgccggcgaccactgggatcacttcggcgcccagcagcttcatgcggaacacattggcctgttggcgctcgatgtcggtggtgcccatgtagatcacgcattgcaggccgaagcgcgcggccacggtggcggtcgccacgccgtgcatgccggcgccggtttcggcgatgatgcgttttttgcccatgcgccgcgccaacaggatctggccgatgcagttgttgatcttgtgtgcgccggtgtggttcagctcttcgcgcttgaggtagatcttggcgccgccacagaactcggtcaggcgctcggcgaaatacagcgggctcggacgaccgacgtaatcgcgctggaagtaggccaattcctcgttgaacgccggatcgatcttggccgcttcatattcgcgggccaggtcgaggatcaacggcatcagggtttcagcgacgtaacggccgccgaacgcgccgaacaggccgttggcgtctgggccgttgcgtagatcggtctgggactgagtcatgggacactccaggagagaatgggtgtgggaagcaatgacggccactctacccctgacgtcctgcgctgaaaaccgataagatcgccgcaacctgtcaggaaaactcacagatgagccgagaccttccacccctcaatgccttgcgtgcctttgaagccaccgcccgcctgaacagcgtcagccaggcagccgagcaattgcatgtgacccacggcgcggttagccggcagttgaaggtgctggaggaacacttgggcgtgagtttgttcgtcaaggaagggcgcggccttaaactcacagatgcgggcgctcgtttgcgcgacgccagcgccgaggcgttcgagaggttgcgggatgtgtgcgccgaactcacccagagcggtgccgacgcaccgttcgtgctgggttgctcgggcagcttgctggcgcgctggctgatcccgcgtctgggtcgtttgaacgcggacttgcccgacctgcgcctgcacctgtcggcgggtgacggtgaccttgacccccggcgccccggcctggatgccttgctggtgttcgccgagccgccctggcctgcggatatgcaggtgtatgaactggccagcgaacgcatcggcccggtgatgagcccgcgtttcgctggctacgagcggctgcgccaggcgcccgcgtcggcgttgtgtggcgaagcgctgttgcacaccacctcacgtccgcaagcctggcccagttgggcgcggcaacacggcatcgaacccggcgcgttgaaacacggccaggggtttgagcatttgtattatttgctggaggcggcagtggccgggctgggcattgcgattgcgccggaaccgctggtggtcgaagacgtgcgcgcgggtcgcctggtggcgccatggggtttcagtgaaaccccggcgcacctggcgttgtggctacccaagcgcgccgcggacgggcgcgccgggcggttggcgcagtggctcaaggcagagctgttgcgccagccggtttagtcaccgcgcttgcacagcaggtaggcggccagcaggcccagtgcgcctacggcaacaccggctgtagtccatgggtgctcttgggcgtagtcccgggtagcaacaccggtttcgcggattttgactttgctttcttcgtaggcatcgctgatcaggtggcgggaatgcttgagggcattctcggcattgcttttcagggccttcaaggttttgcgcgattcgtcagacgcatcgtccttgaggctttccagagacttgagcaggctcgaaatctcggcttccatgctttccagcgacgctttgcgtaaagaagtgttggccatgtggactctcctgaagtgattgagtggcgtgtgtagataccgactgcggccgtttcagaaagtgcagttaatctgaactttcaggtaggaatggtcgccagaagcagtacgaacattgactgctacgcttgcttaacgacccttaggagaactgccatgagtgatcatcacacctacaagaaagtcgaattggtcggctcgtcgaccaccagcatcgaagacgcgatcaacaatgctatcgctgaagccaacaagagcatcaagcatctggagtggtttgaagtgactgaaacacgcggccatatcgagaatggcaaggtcgcgcactatcaggtcaccctcaaggtagggttccgaattgccagtagttgatcgcaacggttgaacttgctgactggccgattgccataacctgcgctacaaccaatgggtgccgatgccgcaagcgtcggcacgctctttttgatcagcgcaaggaaagtaacggatgaagaagttcctgttagcggtaggtttgttgagcattgccggcacagccctggcggcgggcaagccttgtgaagagctgaaaagcgagattgcggcgaaaatcgacgccaggggcgcttcgggctattcgttggaagtggtggataaaggcgcttctaccgacgctaaagtggtcggcagctgcgaaggcggcaccaaggaaattgtctacaagcgcggttaatcccgtgttccagacataaaaaaccgacgcgagtgcgtcggttttttttcgcttgagggtttcagcccttcatcaactgcgccagcaactcgtaggaatgaatccggtcggcgtgctcgtacaggtcgcaggtaaagatcagctcatcggcgccggtttgttcgatcagcacctccagcttggcacggatcttcgccgggctgccgaccatggccaggccgaggaagctgccgaccgcgtctttttcatggggcagccacaggccatccatggttttcaccggtgggcgctgcaccaggctttgcccgcgcatcagggcgaggatgcgttggtagaccgaggtggcgaggtagtcggcttgttcgtctgtgtctgcggcgaccagcggaataccgagcatcacgtagggtttgtccagcacggccgaaggcttgaagtgattgcggtatacgcgaatcgcctcatgcatcaggcgcggtgcgaaatgcgaggcgaaggcgtagggcaaaccgcgttcgcccgccaattgcgcgctgaacaggctggagcccagcagccacaccggtacgttggtgccggtaccggggacggcgatcacccgttggtcgggggtgcgtgggccgaggtaggccatcagctccgccacatcttcggggaaatcgtcggcactgcccgagcgctcacggcgcagggcgcgggcggtcatctggtcggagccgggcgcgcggcccaggcccaggtcgattcggccggggtagaggctttccagggtgccgaactgttcggcgatcaccagtggcgcatggttgggcagcatcacgccgccggagccgacgcgaatcgtcgaggtgccgccggccaggtaacccagcagcaccgaggtggccgaactggcgataccgtccatgttgtggtgttcagccacccagaaacggttgtagccgaacttttccacgtgttgggccaggtccagggaattgcgcagcgactgcgccggactgccgttggcgcgcacgggcaccaggtcgagggtcgagaactttacgtcggacagcgatttcataagcctgcttctccaaaagggccgcaggctttttagacgaaccaaaacctgccgcttcatgtgcatgctctatgcaatgagggcatatacccgagattcaatagcagcccaggaaatttcctactgaatcgctaggtttctcttacaagatgaactttgccgggccgactatcctcagaacccttactgacgcaaaaccaccgttcgaggagaccgctatgagtatcgttaaaaaagcatccgcgcattgggaaggtgacctgaagactggcctgggctccatttccacggaaaccggcgtgctgcgtgaagcgccttacggcttcaaggcccgtttcgagggcggtaagggcaccaacccggaagaattgatcggtgcggcccacgccggctgtttctccatggcgttttccatgattctcggcgatgccgggctcaaggctgacagcattgacacccaggccgaagtgaccctagaccaggttgacggtggttttgcgatcaccgctgtgcacctggtgctcaaggccaagattccgggcgcgagccaggcgcagttcgatgaactgagcaaaaaagccaaggaagggtgcccggtgtccaaagtgctgaacgcgaaaatcagcctggatgccaccctggtcagctaacgcagcaggtccaatgtgggaggggcggtgcgacgattcgacttgcccccgatggcggtctatcagcaacagagatgttgactgactcaccgctatcgggggcaagtcgaatcgtcgcaccgcccctcccacatttagttctgcgttagatcagaactcgtgttttgtcagtgtggtcctattaccatgcagcctaggcgcacactcgtgcgcagcgcattcagggagcttcacacatgaaacgttttgccttggcaatcatctgcggtgtattggccacgtcggctgtggccgcgccaaaagactgcgaagagctcaggaaggagattgaggtcaagatccaggctaacgcggtgccgtcctacaccctggagatcgtcagcaaggaagaagccgacaagcacgacagcgccatggtggtcggcagctgtgagaacggcaccaaggccatcgtctaccagaagaacaacgactgatcagatgcagttgacgctgcgttcttctgcgagcaactgacgcgccgagtcatacaaccggatgttgggtgtgaaggccagcgagcgcccttccagcacatagcgctggccggcctggaagtggtcgtattccagggtcatgaagcaggtgcggtacatcatctggctgagcccacccaaaccgccgccggcggggacttcaaagtcgaaacgcaccatcagttcatgatggccgggcggcatttggaagaaacgtccgtcatccaggttcttgccgtccaagcgttgcgccattaccagcttggaccccggcgtcggcgtggtgaaatcaacccacgcctgctgcgggtctgccggtggcaccggggtggtggtgcaggcactgaggaacagggcggcgacgggaaaccagagctgacgcatggcaggcactcacgtaggaaagagttcagcctgatgccagcggcgacagacttcttgtaagtataaacacgtcgtgccatggaaaaattccgcctgggcgcgatagtctggcgagcaaattacccaggagcggtcggggcatggtcaggcgttttcttccagggttgatggttgtgctgctcagcggctgttccagtgtcagttattacggtcagttggccagtggtcaatggcaattgctgcgcgcccgggagccggtggcgcaggtgatcgctgacccttcccgcccagtgctgttgcgcgagcatctggcgcaatcgcaaaaggcgcgtacgttcgccagtgaacacctgcatctgcctgacaaccagagctacaggttgtatgccgacatcggccggccttatgtggtctggaatgtcttcgccacgcaggagttttccctgtctcccgaaacccattgcttccctatcgcgggctgtgtggcctatcgcggctactacaaccagggcgcggcgcgtggtgaggcggcgttgttgaagcagcgaggcatggacgtgtcgatcggcggtgtcgaggcctattcaaccttgggctggttcaacgacccgatcatgaattcgatgatgaactggggtgatgagcggctggccacgttgatcttccatgagctggcgcaccagcgtttctatgtgaaggacgacaccgagttcaatgagtcgtttgccaatttcgtcgagcaggaaggcacgcgccagtggcgtgctgcacggggcttggcgccgcagagcctgtcggcgtcgaagcagcgtgatgagttcattcagctgatcctcgatacccgccagcgcttggaaaaactctatgcccaacccttggcaactgatgtgatgcgccaggcgaagtcggccgagttcgagcgtctgcgtcgcgattaccggcagctgcgcgacagccagtggggcggggacaaacggtatgacgcgtggatcaaccaacccatgaacaatgcgcggttgctaccgtttgggctgtacgaccagtgggtgccggcgtttgcggcgttgtttgcgcgggaaggtggggattgggtgaggttttataaggcggtggagaagctgggtgggttgccggtggtgcagcgcaaggcggcgttgaggcagttggaaaggggtgctctttagggcctcatcgggggcaagtcgagtcgtcgcaccgcccctcacacattttgaccgtgtgcgccggtcaattgtgggagggggcttgcccccgatggcggtctcaaagtcgctgcaaaaacgcctgatgcatctgatccagcgtttcaaaatgccaggtcggcgcctcggcattcagttcctcgaaactaccaaacccataccccaccgccgccgaatccagcccattcttgtgcgcgccgatcaggtcatgcttgcgatcaccgatcatcaaggtggtggccgggtccaggccttcctcgctcatcaggtgggcaatcagttcgactttgttggtgcgcgtcccgtccagctcgctgccgtagatcaccttgaagtgcttggcgaaatcgaagtgccgggcgatttcgcgggcgaagacccagggcttggaagtggcgacatagagctggcggccttgaccgttcaacgcttccagcagcggcatcacgccgtcgaacacacggttctcataaagcccggtgaccttgaaacgctcgcgatagaaattcaccgcttcccaggccttggcctcgtcgaagccgtagaactgcatgaacgcttgcagcaagggcgggccgatgaagtgttcgagtttggtcaggtccggctcgtcgatccccagcttgccgagggcgtactggatcgagcgggtgatgccctcgcgtgggtcggtgagcgtgccgtccaggtcgaacaggacggtttggtaaggcagggtcatcggtcgaatccttcagccaggtgcaggtctttgagcttcacgtagttcgcggcgctgtaggtgaaaaaggcgcgttccttgtcagtcaatgggcgaatctgtttgaccgggctaccgacatacaggaagccgctttcgagtttcttgcccggcggcaccaggctgccggcgccgatgatcacgtcgtcctcgaccacggcgccgtccatcacgatgctgcccatgccgatcaggatgcggctgccgactgtgcagccatgcagcatgaccttgtgggcgacggtcacgtcgtcgccgatcagcagcgggaaaccgtccgggttgaacggcccggcatgagtgatatgcagcacgcagccatcctgcacgctggtacgcgcaccgatgcggatgcggtgcatgtcgccacggatcacggtcagtggccagaccgagctgtcggcgccgatttcgacatcgccgatcaccaccgccgaaatatcgacaaaagccccggcgcccagggctggcgtgtggttctgataggtgcgaagggtcacgatagcctctctctcttctgctgatagctgcggtgggcgttgattgtaattaagatggccccatctttgttcttacatgtttcttcagccaaggtgcccaccgtgagcgcgaacaaccctcttctgcagtcctacgacctgccgccgttctcggcgatccgtgccgagcacgtccagccggccatcgaacagatcctcgccgacaaccgcgttgccatcgaaggcatcctgcaaagccagggcaaaaatccgacatgggccggtctggtcctggcgatggacgaactgaatgaccgcctgggcgccgcctggagcccggtcagccacctcaacgccgtgtgcaacagcgctgaactgcgtgaagcctacgaaagctgcctgccggcattgagcgcgtactctaccgagatgggccagaaccgcgcactgttccaggcctttgaagccttggccaatagcccggaagccgccggtttcgacgtggcgcaaaaaaccatcctggaacactccctgcgtgacttccgcctgtccggcatcgatctgccgccagagcagcaaaaacgctacgccgaagtgcagagcaagctgtcggagctgggcagcaagttctccaaccagttgctggacgcgacccaggcctggaccaaacacgtcaccgatgaagccaccctcgcgggcctgaccgactcggccaaggcgcagatggccgccgccgcccaggccaaaggcctcgacggctggctgatcaccctggaattccctagctactacgccgtcatgacctacgcccaggatcgcgcgctgcgtgaagaagtctacgcagcctactgcacccgtgcgtcggaccaaggcccgaatgccagtcagaacgataacggcgcggtgatggaacagatcctcgacttgcgccaagagctggctcagttgctgggttacgcgtcgttctccgaactgagcctggccaccaagatggccgagtccagcgaccaagtgctgagcttcctgcgtgacctggccaagcgcagcaagccgttcgccgcccaggacctgcaacagctcaaggcctatgctgccgaacaaggctgcgccgacctgcaaagctgggacagcggtttctacggcgaaaaactccgcgagcagcgctacagcgtgtcccaggaagccctgcgcgcttacttcccgatcgacaaagtgctgggcggcctgttcgccatcgtgcagcgcctgtacggcatcgagatcgccgagcagaaaggcttcgacacttggcacccggatgtgcgcctgtttgaaatcaaggaaaacggccagcacgtgggccgcttcttctttgacctgtatgcccgtgccaacaagcgcggcggtgcctggatggacggtgcccgcgaccgtcgccgcacaatcgacggcgccctgcaaagcccggtggccaacctggtgtgcaacttcaccccggccgacagcggcaagcctgccctgctgacccacgacgaagtcactacgctgttccacgaattcggccacggcctgcatcacctgttgacccgtgttgaacacgctggcgtgtctggcatcaacggcgtggcctgggatgcggtggaactgccgagccagttcatggagaactggtgctgggagccggaaggcctggcactgatatctggtcactatgaaaccggcgagccgctgccccaggacctgctggaaaaaatgctcgcagcgaaaaacttccagtccggcctgatgatggtgcgccagctggaattctcgctgttcgacttcgaactgcatgccacccacggtgatggccgcagcgtggcgcaggtgctggaaggcgtgcgcgatgaggtatcggtaatgcgtccgccggcctacaaccgcttccccaacagctttgcgcacatctttgccggcggttatgcggcgggttactacagctacaagtgggccgaagtgctctcggcggatgccttctccaagttcgaagaagacggcgtactcaacgccgaaaccggtcgtgctttccgcgaggcgatcctggcgcgtggtggctcccaggagccgatggtgctgttcgtcgacttccgcggacgtgcgccgtcgattgacgcactcttgcgccacagcggcctgagtgaggacgcggcagcatgagtgaagggcctgtgattaccaaaaagcagtttatcgccggggcggtctgcccggcgtgcagtgagccggacaaactgaagatgtggaccgaggacagcgtgccgcaccgtgagtgtgtggcctgcggttataccgacacgctgaatgatcaagggttgtcggtgcccaaggaattgggcacgcgggtcaataccacggcgttgaaagcgccggcggacccgaaggtgcaggcggtgcagtttttccccaatcccaagctgaaaaaggactgatacccgcttagggtgtcagcaccaattcagcgtctttcttgggttcgacacggctgctgccggccgtgttgagccagcttttcattgagcacagcgcgaattcactggtgctgcagtcgccatttgccaaggcggtgcgcaacttgtcgatatcagccttcatcatgtagcgaaccccgtccttgaagccgttgctggtgccaaacccgcccagggtcatttcgttcagcgcgtcttccttgctccacccctgaatcaccactcgatacatcgcggccatcaggccggtgcgatcagagccatgcttgcaatgcatcagcaccgggccgttggcttcggcgtcctggatggccctgagtgccgccagtacgtcggaatcgtcgacatggttagtgcgataagtcagctgtacccgtttgatatcagatgacttcaaccaggcggcatcagattccggcaaaaagttgatcactgtaccgatcttgagtttttccaactcaggcacggcgctgctatcgggcaaagcgctgcgatagagcgttggcgtcatttggtgcaggttgaattggttgcccactggctgggcccactcgggtgagcgaatggacgaagtctcatcggcctgggcgtgaacggcgccgagcagtgccatgaatgccaggccgagagcaggcagcaatcgagtgttggacatgcgctttgtgacccaatagggaaatggctgatggagcgcagattcgcccagggggggtcaacaccgtgtgaggtgctcgtcaaagaaacgtgaatggcctcatctgatccggtgtttttaccgctcaagcgattcgtcctgatgcttaggctgctatcatttgtaactattgtttgccggtgcctgatatcccactggcttgccacacatcacgctgctcccagaagtggcggataaacccgtgaccacatgatgaggtgccaccatgtctgatcaagatcaagacaacccccggcgtgactttttgcgcaaatccttgaccttgatcccgatggtcacggttgccagcaccggccttggcggctcgatgctgatggcaacgcctgaaccggcgcaggccgctcccgccaagcctgcgccgagtgaaaaggcctacgagcctacttacttcacggctgaggaatgggcgtttatcaacgccgccgtcgagcgcttgatccccgccgatgaccaaggcccgggtgccctggaagccggggcgccggaatacatcgaccgtcagatgaacaccccgtacgccagcggtgccctgtggtttatgcaaggcccgttcaacgcggatgctgctccagagatgggctggcagtccaaactggtacccaaggacatctatcgcctgggcattgccgcgacggatgcctggtcgaaagccttcaacggtaaaacttttgctgcgcaagacagcgctacccgagacgacatgttgcgtcgtctggaggctggcggaagtgaagtgacggcgcattttgacgcggtgccgccgaagatgttcttcaacctgttgctgcaaaacaccaaggaagggttcttttgcgaccccatccacggtggtaacaaaggcatggtcggctggaccatgatcggcttccccggcgctcgcgccgatttcatggactgggttgaacgcaacgagcaataccccttcccggcagtttccatccgtggcgagagggcttgaacgtggcgaccatcatgaagaaagtggatgcggtgatcgtcggcttcggctggaccggcgcgatcatggccaaggaactgaccgaagcaggcctcaacgtggttgcgctggagcgtggcccgatgcaggacacctacccggacggcaactatccccaggtcatcgacgaactgacctacagcgtgcgtaaaaaactcttccaggatatttccaaagagaccgtgaccattcgccatagcgtgaaggacgtcgccttgcccaaccgtcagttgggcgcgttcttgccgggcaacggcgtgggcggtgcgggcctgcattggtcgggcgtgcatttccgtgtcgacccgatcgagctgcgtatgcgcagccactatgaggagcgctacggcaaacacttcatccccaaggacatgaccatccaggacttcggcgtaagctatgaagagctggagccgtttttcgactacgcggaaaaagtcttcggcacctccggtcaggcctggaccgtgaatggtcggttggtaggcgaaggccgtggcggcaacccgtatgcaccggaccgttccaatccgtttccgttggaagcgcagaagaataccgtctccgcacaactgtttcagaaagcggctgccgaggtgggttacaaaccctacaacctgccgtccgccaatacctcggggccgtataccaatccttacggtgcgcagatggggccgtgcaacttctgcggtttctgtagcggctatgtctgctacatgtattccaaggcctcgccgaacgtgaacatcctgccggcgctgcgccaggtaccgaactttgagctgcggcccaattcccacgtgctcaaggtcaatctcgacagcaccaagagcaaggccactggcgtgacttacatcgacgcccaaggccgggaatgtgagcagccggcggacctggtgatccttggcgcgttccagttccaaaacgtgcgtttgatgctgttgtcgggtatcggcaagccctatgacccgataaccaatgagggcgtggtgggcaggaacttcgcctaccagaacatggccaccatcaaggccttcttcgacaaagatacccataccaacaacttcatcggtgcaggcggcaatggcgtggccatcgatgacttcaacgccgacaacttcgaccacggcccccatggcttcgtgggcggttcgccgatgtgggtcaaccaggctggcagccggccgattgccggcacgtctaaacctccgggcactccggcctggggtagcgcgtggaagcgcgccacggccgattactacacccaccaggtgtcgatggatgcccacggcgcccatcaatcctaccggggcaactatctggatctggacccggtgtaccgcgatgcctacggcctgccgctgctgcggatgacgttcgactggcaggaaaacgacatcaagatgaaccgcttcatggtcgagaaaatgagcaaggtcgccgaggcgatgaaccccaaggcgattgccctgctcggcaaaaaggtcggtgagcatttcaacacggcgtcctaccagaccacccacctcaacggcggcgcgatcatgggcaccgacccgaaaaccagcgcgttgaaccgctatttgcagtgctgggatgtgcacaacgtgtttgttcctggcgcgtccgctttcccacaaggcctgggctacaaccctaccggcctggtggcggcgctgacctactggtcggcgcgggccattcgcgagcagtacctgaaaaaccccggcccactggttcaggcataaggagcgatgaccatgaaagcacttgttatcgccaccttcgcccttttcagcagctgctctgtcagtgccgctgaaagcgatttgatcaagcagggtgaatacctggcccgcgccggtgactgcgtggcctgccacaccgccaaaggcggcaaacccttcgccggcggcctgccaatggaaacgccgattggcgtgatctattccaccaacatcaccccggacaagaccggcctgggcgactacagcttcgaggacttcgacaaggccgtgcgccatggcgtcgccaagagcggtagtacgctttacccggcaatgccctacccgtcttacgcgcgcgtcagcgacagcgacatgcaggcgttgtatgcgtatttcatgaagggggtcgagccggttgctcagcagaacaaggacagcgatattccgtggcccttgagcatgcgttggccgctagcggcgtggcgttggatgtttgcgccggctgtcgacgagcatcaggcgcaagccgccgctgatcctgtggtgagccgcggtgcctacctggtggagggccttggccactgcggcgcgtgccatacgccacgggccttgaccatgcaggaaaaagccctgagtgccactgacggcaacgctttcctgtccggcagtgcgccgctggagggctggatcgccaaaagcctgcgcggtgaccacaaggatggtctcggcagttggagtgaggaacagttggtgcaattcctcaagaccggccgcagtgatcgcagcgcggtgtttggtggcatgagcgacgttgtcgtccacagcatgcagtacatgtcggaaactgacctgacggctatcgcccgttacctcaagagcttgccggcggtggaccccaaggaccagccgcatcagtacgacaagcaagtggccgaggcactgtggaaaggcgatgacagcaagccgggcgcgtcggtctatatcgacaactgcgcggcctgccaccgcaccgacgggcatggctatacgcgggtgttcccggcgctggcgggtaacccggttttgcagacggcggatgccacgtcgttgatcaacatcgtgttgaacggcggcaccttgccggctacccacgcggcgccatcgaccttcaccatgccggcgttcgcctggcgcctgtcggatcaggaagtggcggatgtggtcagtttcattcggggcagttggggcaataaaggtgcgccagtgaaagccaacgatgtggcggacttgcgcaagaacgatatgcgcaccacctcgggcgatgacctgggccaggttactcaacagcactgatccctggcttaccgccaaacggcactggtcagaagccttgcgcctcgatactgtatataaaaacagtatcgaggcgctttcatgtctactccgctgccgccccgaggccggggcacggccaccaacctgcacaaccgcttcgcaccgactgtcagcgtggtggaggatgacggctggttccaggaagtgccgccgacccatggcactgaagtgcgcatcgaaacggccaagaccatcatcacccgcaacaattcgccggacttgccgttcgatcgttcgatcaacccctaccgtggctgtgagcacggttgtatctactgctacgcgcggccgagccatgcctattgggacatgtcgccggggctggatttcgaaaccagactgatcgccaagaccaacgctgccgatgtgctggaacagcagctgtcgaaaccgggttatgtgtgcgcgccgatcaacctgggctccaacaccgacccgtaccaaccgatcgagcgcgaatacaagatcacccggcaaaccctgcaagtgctgctgcgctatcgccacccggtgaccatcataaccaaggggtcgctgattttgcgcgatctggacctgctcaccgagttggcgcgccagcgactggtggccgtgatgatcagcctcaccagcctggacgacgaactcaagcgcatcctggagccacgcacggcggcgcccaaggcgcgtctgcgcgcgatccgggtgatgcgtgaggcggggatcccggtgggcgtgctgtgctcgccgatgatcccgatgatcaacgacagtgagttggaaagcctgctgaccgaagctcacgcagcgggcgcgcaaagtgcggcgtacatgatgctgcgcctgccgctggaggtggcgccgttgttcgaggagtggctggcggcgcattacccgcagcgtgcggcccatgtgatgagcctggtgcgccaggtgcgtggcggcgaggtgtatgacagccgcttcggcgtgcgcatgcgtggcgaagggccgtttgccgatttgctggcgcagcgcttcagcaaggccatcaagcggctggggctcaaccgccgggaagggtttaacctggattgcacggcgttctgtcctccgggcagacagatggcattgttgtagactgacaaggaggaatgcatcgttcctgtaggaatagtcgcgttttgacatcactgaaacccgcgatctagagcggttcattcagtttgagttaagtttcgacggttaccttgttcagcgagtgactgatgagtcggcactctggcccctggcgttttacaactaatccactggccaagcgtccaactgacctgaacactcccctgcattaatcaagaggatgaatcatgagtgacaaggataaacagccgttggctgcgtcggcttctgcccctcaggtggctgaaaccgccgatgcagcgctaaagcacattgttgacggctttttgcatttccatcacgacgtcttcccccagcaggaagaactcttcaagaaactcgccacggcccagagcccacgggcgatgttcattacctgcgccgactcgcgcatcgtgcccgagctgatcacccaaagttctccgggcgatctgttcgtgacccgtaacgtcggcaacgtcgtaccgccttacggccagatgaacggcggtgtttccacggctatcgagtacgcggtactcgccctgggcgtgcagcacatcatcgtctgcgggcactccgattgcggcgccatgcgcgcggtgctcaaccccgacagcctggaaaagatgccgacggtcaaggcctggctgcggcacgccgaggtcgccaagaccatggtccatgacaactgcgactgcgccaatgaaggcgagagcatgaaggtgctcaccgaagaaaacgtcatcgcccaactgcaacatttgcgtacccacccctccgtggcttcgcgcatggccaatggtcatttgtttatccacggttggatctacaacatcgagaccagcgaaatcagcgcctacgatgccgatcagtcgacgttccgaccgttgagcggcgacggaccgatcccttgcgcgacgcctaaagcgcgcttctaaaacacttccctgccgggtaaagcggtggctgccatggacgcagccaggctttaccgcgcccggcgaatgcctcgggagagccatcatgcgtgctgctcaattgaaagctgtattgccaagggagctgctcgcttccgtggttgtgtttctggtcgccctgcccttgtgcatggggattgcgatcgcctccggcatgccgccggccaaaggcctgattaccgggattatcggtggcctggtggtgggctggctggcgggctcgccgttgcaggtcagcggccccgcggcagggctggcggtgctggtgttcgagttggtgcgccagcatggcatgctgatgctcggaccgatcctgctgctggcgggattcctgcagctggttgccgggcgtttgcgcctgggctgctggtttcgcgtcacggcaccggcggtggtgtacggcatgctggcggggattggcgtgctgattgtgctgtcgcagattcatgtgatgctcgacggcgcgcccaagccttccgggttggataacctggcaggcttcccggcggcactggccgacgcaatcccgaccctgggcggtggcctcggctggcaggcagggttactcggtttgtcgacgatgctggtgatgtacgcctgggacaaattgcgcccgcagaagctgcgctttgtgcctggcgctttgctgggcgtgggcctgaccacggtggtcagcctggtgctggcgttgcaggtcaagcgtgtcgaagtcccggaaaacctcgccgatgctatcgactggctacgccccagcgacctgttgaacctcgccgatccccagctgttgatcgcggcatttgccgtggcgtttatcgcgagcgctgaaacgctgctgtctgccgcggcggtcgaccgcatgcacagcggtcagcgttcggatttcgacaaggaattgtctgctcaaggtgtcggcaacatgctctgcggcctggtcggcgccctgccgatgaccggcgtgattgtacgcagctcggccaacgtgcaggccggcgctaccacgcgcttgtcggcgatgttccatggcctgtggctgctggcgttcgtgctgttgctgtcgagcgtgctgcaaagcatcccggtggcgagcctggcgggagtgctggtgtacaccggtatcaagctggtggacatcaaggcgttcaaggcactgggacgttatgggcggatgccgatgtttacctacgcggccacagcgctggcaatcatctttaccgacctgctgaccggcgtattggtgggcttcgggttgacgttggtcaagctggcgttcaaggcttcacggctcaaggtcagcctgatcgacttgcctcaggacggtgagatggagctgcgcctgacgggtgcggcgacctttctgaaagtgcctgcgttgactcaagtgttgtcgacggtgcctgccgggacgaccgtgcatgttccgctgagcaacctgagttacatcgaccattcctgcctggagttgctggaggaatgggggcgggccaatgcggccaagggctcgaagctggtgattgaggcgcgcgggttgaaacgtaggctggaaggtcgggtgaggacgacgacagggattggctcagcgccagcctgaacagcaaacaacacccctttaggagctggcaagccagctcctaaaggcgggatcaggccggctgatccagcgccaactcaacccccagctgtcgcgacaggcatggccagcgcttccacgcggcttcggtgtccgggctcttgagctgctcgcgataagcctccacggactccagcgcaaagctgtcttcgttgagcatttcatccactgcgtggtgcaccgcttcatccagctggttggcgaaggcttcgccgatcagctgatgggcaatgacattggccactgtggtatcggccggaatcaacggctggccaaagtgcttgatatacagatcgttgacctcttcgaccaggcgatgagccaggtaggcctcatccagcaggccatcgagaccttcatggccggccaggatggcgggcggttgcaggaagaaatgctcggcgatcttcagtaccggcttgatctggctttcgataccggcctcgcgggccacgtcgttggcggcgtccagcaagtccgggactaggtcgatgtaggcggtgacaaagcgtgtcatgacaatgttgcgatcaccgtcagccagagatatggccgaatgcaggtgcggcaattgtttttccagttgcagggcaagctggccagtgctggcttcgtgttgatgggcacgggaaatctgctcgcgcaatgcggcggtgttcatgaaagctccagtgatgcaggcgtaggaaaagggagaagataaggtagctcgtttatacgagcgcctcagacgcatttgtcataattatttcatggttatgcgcctgcgttatatcgaattgccatcgttcgtcggataaacgattccgtgcccggttttattgactccagccagtcatttctactcatttgcccctacacattgcggggttgcagagcctgtctatactcggatttgtacgcgattagctgatgacgccagactgcataagcaggcaaggccaggcggttgtaagcagtatggaagccgctcccttcgacgcaggtgcaaaccggcgggataacaagaacgataaggggaacccgcaatgatgcgacatccacatgtttggatgggcctcctgttgtggtcggtattcggccaggcacatgccgcctggacaacgaatatggcgccaggggcgacagaagtcagtcacgctgtgttcgacctgcacatgaccattttctggatctgtgtggtgattggcatcatcgtgtttggcgcaatgttctggtcgatgatcgttcatcgccggtccacgggccaggtggcggccaagttccacgagagcaccaccgtggaaatcctctggaccgtcgtacccttgctgatcctgatcgcgatggccattccggcgaccaagaccctgatcaatatctacgacagcagtgagtcggatatcgacatccaggtcaccggctaccagtggaagtggcattacaaatacctgggccaggatgtggagttcttcagcaacctggccacgcccgccgaacagatccacaaccaggcgaccaagggcgaacattacctgctggaagtcgaccagccgctggtgctgccagtgggcgccaaggtgcgcttcctggtgacggccgccgacgtgatccactcctggtgggtgccggcgtttgcggtcaagcgcgacgccatccctggcttcgtcaacgaggcctggacccgtgtcgagaagcctggcatctaccgtggccagtgcgccgaactgtgcggcaaggaccacggcttcatgcctatcgtggtcgaggtcaagtccaaggccgactacgacacctggctcggcgagcgcaaggcagaggccgccaagctcaaggaactgacctccaaagagtggaccctggaagagttggtggcccgtggcgacaaggtctaccacaccacctgcgtggcctgtcaccaggccgaaggccagggcctgccgccgatgttcccggcgctcaagggttcgaagatcgccaccggtcctgccgccgatcacctgagcctcgtgtaccacggcaagcccggcaccgcgatggcggcattcggcaagcagctctcggaagtggacatcgccgccgtggtgacctatgagcgcaacgcctggggcaacaacaaaggcgacatggtcacgcctaaagacgtgctggccatcaagcaggcggaaagcaaatgacctctcccatggcattgacctcgacccgccccgcccactcgcttgcaggagaacggccatgagcgctgtgatcgacgaccatggtcacgccgaccatgcccacggccccgccaaggggctgatgcgctgggtgctgaccaccaaccacaaagacatcggcaccatgtacctgtggttcgcctttgccatgttcttgctcggcggctcgttcgccatggtgatccgtgccgagttgttccagcccggcctgcagatcgtgcagccggcgttcttcaaccagatgaccaccatgcacgggctgatcatggtgttcggcgcagtgatgccggcgtttgtcggcctggccaactggatgatcccgttgatgatcggcgcgcctgacatggccctgccgcgcatgaacaacttcagtttctggctgttgccggcggccttcctgctgctggtctcgacgctgttcacgccaggcggcggtcctaacttcggttggaccttctatgcgccgctctccaccacctacgcgccggaaagcgtgacgttctttatcttcgccatccacctgatgggcatcagctcgatcatgggcgcgatcaacgtggttgccaccatcctcaacctgcgtgcgccaggcatgaccttgatgaaaatgccgctgttcgtgtggacctggctgatcaccgcgttcctgctgatcgcggtcatgccggtgctggccggttgcgtgaccatgatgctgatggacatccacttcggcaccagcttcttcagcgcggccggcggtggtgacccggtgctgttccagcacgtgttctggttcttcggccaccccgaggtgtacatcatgatcctgccggccttcggcgccgtcagttcgatcatcccgaccttttcgcgcaagccattgttcggctacacctcgatggtctacgccacggcgagcattgcgttcctgtcgttcatcgtgtgggcgcaccacatgttcgtggtgggcatcccgttggtgggcgagctgttcttcatgtacgccaccctgctgattgccgtgcccaccggggtgaaggtgttcaactgggtcagcaccatgtggcaaggctcgctgaccttcgagacgccgatgctgtttgccgtggccttcgtgatcctgttcaccatcggcggtttctccgggctgatgctggcgattgccccggcggacttccagtaccacgacacctatttcgtggtggcgcacttccattacgtactggtgcccggtgcgatcttcggcatcttcgcctcggcctactactggctgccgaaatggaccggccacatgtacgacgaaaccctgggcaagctgcacttctggctgtctttcgtgggcatgaacatggcgtttttcccgatgcacttcgtcgggctggcgggcatgccgcggcgggtgccggactacaacctgcagttcgctgacttcaacatggtctcgtcgatcggcgctttcatgttcggcgccacgcagatcttcttcctgtttatcgtgatcaagtgcatccgtggcggcccgccggcgccggccaagccctgggatggcgctgaaggcctggagtggagtatcccttcgccggcgccgtaccacaccttcaccacgccgccggaggtcaaatgaacacgccttggcactgcgtacacggccaatgtgggagggggcttgcccccgatggcggtgtgtcagccgacatcatgattggctgtaaaacagctatcgggggcaagccccctcccacaatggcctcattcacattgggtgggcgtcatggctgaatccttgccgatcaagcgcctggtcacgcgcctgctgatcctggtggtggcgatgttcgccttcggctttgcgctggtgccgatctacgacgtgatgtgcaaggcgttcggcatcaacggcaagaccgccgggcagtatgagggcgagcaggttgtcgacccgacgcgccaggtgcgcgtgcagttcctgtccaccaacgccatcgacatggtctgggatttctatgccaaggcggacgaagtggtggtcaacccgggtgcggtaaccgagatgctcttcgtggcccacaaccccaccgacaagccgatgactgcccaggccgtaccgagcatttccccggccgaagcggcgatgtatttccacaagaccgaatgcttttgcttcacccagcaagtgctgcagccgggccagcgcatcgagatgccggtgcgcttcatcgtcgaccgcgacatgcccaaggatgtgaagcatctgaccctggcgtacacgctgttcgatatcactgcgcgccaaccgcccgtggctgtgcacagcggcggctagctactgtttgccccctcaatcaggagagcgaatacatgtcgactcatgatacgtactacgtaccggcgcaaagcaaatggccgataattgccacgattggcctgctggtcaccgtgtatggactggctgtgtggttcaacgacttgaaggcggcacgcccggaatcccacggcccgtggatctttttcgtcggcgggctgctgctggcctacatgctgttcggctggtttggtgcggtgatcaaggaaagccgcgccggtttgtacagttcgcagatggaccgctcgttccgctggggcatgacctggttcatcttttccgaagtgatgttctttatcgccttcttcggtgcgctgttttatgtgcggcacatgtccggcccgtggttgggcggtgagggtcacaagggcattgcgcatatgctgtggccgaacttcgaattcacctggccgctgctcaacaaccctgaccccaaaatgtatcccgcgcctgaaggcaccatcagcccttggggtctgccgctggtcaataccatcctgctggtgagttccagcgtgaccatcactatcgctcaccatgccctgcgcaaaggccatcgcggcgcgctgaaaatctggttggcgatcaccgtcctgctgggtatggcgttcctgggcttccaggccgaggaatacatccacgcgtacaaagagttggggctgacgctcggctccggcgtctatggcgcgaccttctttatgctcaccggcttccacggcgcccacgtgactattggcaccctcattctgttcgtgatgctgatgcgcatcctcaaggggcatttcaatgccgagcaccagttcggcttcgaggcggccagttggtattggcactttgtggacgtggtgtggatcgggctgtttttcttcgtctacgtgttgtgagacggcttaccacggcgcatgagaaaccagttggccgctgaaaaagccccaggtgatcaaggccagggtgatcacggccagcaccacacgcacggtcagggcgttgacgaggcggttggagttgccctcgtccttgaccagaaagaacaagccactgaacaggctcacgacggtcgcgatcagcatcagggcaatagcggctttgagcatggtcgggctccacggggatgggcgggcaatgaaaacaagtatagccagcgccgcaaaacgctttcgtccagggatcgcacccaccttagtggtgctggtgctgctgcccctgatggtggggttggggttctggcaactgtcgcgcggccatgaaaagcagcggctggtggatagttatgccgagcggcgcgcagcggagccggtcagcagtgcgcaactcaatgatatggccgacccggcctttcgccgcgtgcgcctgcgtgggcagttggatgccgagcacagcgtgtttctcgataaccgcatgcgcgacggcaaggccggcgtagagctgctgcaacccttccacgatcaggccagcggcctgtggctgttgctgaatcgcggctggctgccctggccggaccggcgcacaccaccagccttcagcaccccggagcagcccttgaatctggatgcctgggtctacgtcgcccctggcgaaaccttccaactgcacgccgaccccgccagtgcgcaatggccacgcctgctgacggcgctgcaccccgccacgttgtgggcggagttggggcgcagcggtttcgcctacgaactgcgcgccgaacccggccccggcacttacgaaaccacctggcccgtcgtggccatgggcccggaaaaacacctggcgtatgccgtgcagtggttcgccatgtcgctagcgttgctggcgctttacctctacctcggatggcacaacaaaaaggagaagccccatgggagcggccatgaatccacccaacatgtctgaggtgcctgatcggcgcaaaggccgttggcagttgatcctgatcctgatgatggtgatcggcccgatggcgctggccaccttcatgtacaagctgcagttctgggtgccggacagtcgcagctaccacggcgagatgatcggcaacggccagacccgcgccgacattggcgtgccggccgatgagcagcgctggcaactgctggtcaccgcgcccgccgcgtgtgccgccgattgccagcaactggtctacctcgcacgccaattgcagattggcctggggcgcgacgcttcccgtgccagccatgccttggccagtgcgcagccgctgggcagcgactatgacgccaagctcaaggccgagtacccgcaactgcaacgctacccgctggacttgtcgaccttcagtaaaaatgccgctgcgccgggcgatgcgcagctgtggatcgtcgacccccacggcaacctggtgctgcgctacgacgccagggtcaacggcaaggacttgctcaacgacctgcgccatctgctgaaactgtcgaacatcggataggggcatcgtcatggccaaacctggatttcgcctcgcgttgtttgcgaccttgctggcgctgattgtcgtgctgctgggggcgtatacccgcctgacccacgccggcctggggtgcccggattggcccggctgctacggctttatcagcgtgcccaacaccgaggctcaactggcccatgccgagctgcatttccccgatacaccggtagaggccgacaagggctgggccgagatgacgcatcgctacttcgccggcaccttgggcttgttgattgtgttgctggcggcgcgctcgtggagccatcggcgcaatccgggccagccggtgaaactgccgctgttcgtgctggcggtggtattcgcccaggccgcatttggcatgtggacggtgacgttgaagctgtggccgcaggtggtgacggggcatctgttgggtggctttgcgacgttgagcctgctgttcctgctgaccttgcgcttgtctggcgtattgccggccttgatcgtgcccaagcgcctgcaatattgggcgacggcaggcctggtgctggtgatcagccagatagccctgggcggctgggtcagttcgaactatgcggcggtggcctgtatcgatttgccgacctgtcatggcgagtggtggccggcagccgattttgccaatggcttccatctcacccaacacatcggccccaattacctcggtgggcagttggacagcgaagcgcgcaccgccatccacctgacccaccgcatcggcgccgtcgttgtcagcctggtgctggtgggccttgcctggcaattgcgcgcggtcggcatgacgcggttggccggcttgctgctgatcgccctggcggcgcaaatctgcctgggcctgagcaatgtgtatttccatctgccgctgccggttgcagtggggcataacgcgggcggtgcggcgttgttgctggcgctggtactggtcaactaccacgcccgcaccagcctggtccgggtgcgcaaccagctgccgtttggctggcgctttatcccgcgcaagcatgtgtcgggcctcgttacccttaaaggagagatgccatggcgaccttgatcggcgcgcgtcacggccaggccatctggcgtgattatctggagctgaccaagccgaaggtggtggtgctgatgctcatcacctcgctggtggggatgttcctggcgacccgcgccggtgtgccgtggaccgtactggtgtttggcaacctggggattgccctgtgtgccggtggcgcggcggcggtgaatcatgtggtggatcggcggatcgatgcggtgatggcgcgcacccacaagcggccgttggcgcaaggccgtgtgtcgccgctggcggcgctggcctttgctttgtttctggctgttgcagggttggctctgctgctggcgtttaccaaccctctggcggcttggctgacgctggcctcgctgctcggctatgcagtgatctacaccggctttctcaagcgtgcgaccccgcagaatattgtcatcggcggcttggccggggctgcgccgcctctgttgggctgggtcgccgtgaccgggcatatcagcgccgagcccctgctgttggtgctgatcatcttcgcctggaccccgccacacttctgggccttggccatccatcgcaaggaagaatacgccaaggccgatatcccgatgctgccggtgacccacggcgagcactacaccaaggtgcacatcctgctctacaccttcgccctgctggcggtgagcctgatgccctacgtgatccacatgagcggcctgctgtacctcggctgcgccctggtattgggcgggcgctttctgcaatgggcctgggtgttgtaccgtggcggtcggccgcacgcggcgatcaacaccttcaagtactctatctggtacttgctgctgctgtttatcgccctgctcgtagaccactacctactgttgaacctatgactcgaactcaaaagactgtcttcatcctagtggccctggtggcattgatcatgggcctgaccgttaacaaagtgctctcgggcaagggccagggcgaccccactgccttgatcgacgccggcatcatcctgctgccgcaaagtcgtcaactgccgccggtgaccatgaccaaccaggacggccagccagtgctggtcaatgaattgaaaggcaagtggagcctgttgttcttcggctacaccttctgcccggacatctgcccgactaccctcgcccagctgcgccagatcaagagcgagctgcctaaagaggctgtggataagttgcaggtgattttggtcagtgtggacccgaaccgcgatacgtcgacccagctcaagcagtacctgggctacttcgacccgcagttccagggcctgacgggcgcgaatgtggaggaggtgcagaaggtctcgaatgcggtgagcatcccgtttattccggcggacaccagtaagccgaactacaccgtcgaccacagcggcaacctggcgctgatcgggccggatggaacgcagcgtgggtttattcgtgcgccgctgaacaaccagaagctggtggcgcagttgccagcgttgctgcagcgtcaataacaggcgacacataacaaatgtgggagggggcttgcccccgatagcagtgggtcagccaccaaagcagtgactgacactcagcaatcgggggcaagccccctcccacattttttgatctccagtacttgggagatcgggttacatcagaacgccggcttgatcgcgcctttgtacttctcttcgatgaattgcttcacttcaggcgtgtgcagggctgcaaccagcttcttcacggcgtccgagtccttgttgtcttcgcgggtcaccaggatgttcacgtaaggcgagtcgctgccctcgatcaccagcgcatccttggacgggtccagcttggcttccagcgcgtagttggtgttgatcagcgccaagtcgacctgggtcagtacgcgcggcagggtagcggcttccagctcgcggaatttcaggcctttagggttggcggtgatgtccttgatggtcgacaggatattggtcgggtccttcaaggtgatcaggccgttcttggccagcagcaacagtgcgcgaccaccgttggtggcgtcgttggggatcaccacgttggcaccgctaggcagctcgtccagcttcttgtacttgctggagtacgcgcccagaggctccaggtgcaccgcgccaacgctcaccaggtgagtgcccttggctttattgaattcatccaggtacggctggtgttggaagaagttggcgtccaggcgcttttccgcgacctgtacgttcggctgcacgtagtcggtgaagactttgacctgcaggtccacgccttctttggcgagggcaggcttcacgaattcgaggatttccgagtgtgggaccggcgaagcggcgaccgtgatggtctcggcgtgggcggaaaacgcggcaacggcggcgaaagcaaccagtagttttttcatccaacaagctccttgttcgggcatgtgccggcatgtcaccggcaatggccgttattttcgagaaaagtgcaccaccagcttgtcgccgacggtttgcagaatttgcaccaggatcaacagcatcaccactgtgaccaccatcacgtcagtctggaaacgctggtaaccgaaacggatcgccaggtcgcccaggccaccggcacccaccacaccggccatggccgtgtaggacaccagtgtaatcgccgtcaccgtgatcgccgcgaaaatgcccgggcgggcttcgggcagcaaggcgttggtgatgatctggcgcgtgctggcgcccatggactgggtggcttcgatgatgccgcggtccacttcgcgcagcgcggtttccaccaggcgtgcaaagaacggggtcgcgcccaccaccagtggcggaatcgcaccggccacgcccagcgaagtgccggtgatcagcacggtgaacgggatcatcacgatcagcaggatgatgaacggcagcgagcgcaggatattcacgatcagcgacagcagcgcgtacaggcctttctgttcgaacagttggcgcgggctggtcaggaacagcagcacgcccaggggcaggcccagcaccacggtgaagaacagcgagccgaacagcatggtcatggtgtcgccggtggccagccagatttcggaccagtcgatattggcgaagaaactcaacaggacgtccattagcgcaggatctccatgtggacatcagcggcggtgaagcgcgcaaacgcggcttccatgtcgccaccggtgacggcgagggtcaattgcccgtaagggatgtctttgatgcggtcgatacgaccggcgaggatgctgtagtccacgcctgtttcgcgggcgacggtgcccagcagcggcgcgtaggtcgcttcgccctggaacgtcaggcgcacgatacggcctggcacgtgggcgaagtcgtcgcgctgctcgttttcgtcgacctgctcggactcttgcacgaagcgcttggtcgtcgcgtgcttggggtgcaggaacacatcggccaccgagccttgctcgacgatcacgccagcgtccatcaccgccacctggtcgcagacgcggcggatcacgtccatttcatgggtgatcagcacgatggtgagcttcaactcgcggttgatctcggccagcagttgcaataccgaggcggtggtctgcgggtcaagggcgctggtggcttcgtcgcacagcaggatctttggtttggtcgccagggcgcgggcgatgccgacgcgttgtttctggccaccggacaactgcgccggatactttttggcgtggtccgacaggccgacgcgggcgagcagttctgcgacgcgcaggtcgatgtccttgcgcgacagttcgccggccagggtcagcggcagtgccacgttgtcggccacggtcttggaggccagcaggttgaagtgctggaagatcatcccgacctgctgacggaagcggcgcagaccgttggcgtccagggcggtgacttcttcgccgtctaccgtgatcttgccaccgctcggttcctcgaggcggttgatcaggcgcagcagggtgcttttacccgcaccggagtggccgatcaggccgaacacctggccgtttgcaacactcaggttggtggcgtgcagtgcgggaatatccctaccggcgacgcggtaggttttatggacgttttgaaactcgatcacgtagcgaaccttgtggggcgcatggaaaagggatcagcggttagccgggcgcgcattttagcctgtccgtatagcgtttcttagcatttatttcgcattcaaccagcgatttggcaataacgcgatcaaaggtcataaaaaaggaacggcccaaaaccccatcagtcactacttaagcaatgcgattcccgggtgccgtgcctgggtctgaataaggagttttgactgatgagtacgaaaaagccaaagagcgaactcgcagggaccgacaccctggaccgtaagaacaccaatgccaagctagagtctttggaagaattccgctccgacgctaccggccaggccctgcgtaccaaccagggtgtgaagatctccgacaaccagaacagcttgaaggtcggcgcacgcgggccgtcgctgctcgaagatttcatcatgcgtgaaaaaatcacgcactttgaccatgagcgtatcccggagcgcatcgtgcatgcccgtggtactggcgcccatggctattttcagacttacgagaaccattcggcgctgaccaaggccgggttcctgcgtaaccctgggcataaaacgccggtcttcacgcgtttttccaccgtgcaaggcccgcgtggttcgggtgacaccgtacgtgacgtgcgcggttttgccgtgaagttcttcaccgaagaaggcaacttcgatctggtgggcaacaacatgccggtgtttttcattcaggacgcgatcaagtttcctgacttcgtgcacgccgtgaagcccgagccgcacaatgaaatccctacaggcggctcggcgcacgatacgttctgggacttcgtctcgttgcagcctgaatcggcgcacatggtgatctgggcgatgtctgaccgcgccattccaaaaagcctgcgcagcatgcagggttttggcgtgcacaccttccgcctagtgaatgccgagggaaaatctaatttcgtcaaattccactggcgccctacagccggtacctgctcgctggtgtgggacgaagcgcagaagctcgccggtaaagataccgactaccatcgccgcgacctctgggaagccattgagatgggcgactaccccgagtgggaattgggtgtgcaggtgattcccgaggacaaggagcatgcgttcgacttcgacatcctcgacccgactaagctgatccctgaggaactggtgccgattacgccgctgggcaagatggtgctcaaccgcaacccggacaacttcttcgctgaagtcgagcaggtggcgttctgcccaggccatatcgtgccgggtatcgacttctccaatgacccactgctgcaaggtcggttgttttcctacaccgatacgcaaatcagccgactcggcgggccgaattttcaccagttgccgatcaaccagcctgtgacgccgctgcataacaaccagcgcgatgccatgcaccgcagcaccatcgataaagggcgcgccgcttatgagccgaactccatcgatggcggctggccgaaagaaaccccaccggctgcgcaggatggcggttttgagtcctaccctgagcgtatcgacgcgcacaagatccgtgagcgcagcgagtcgttcggcgatcacttctcccaggcgcgtctgttcttccacagcatgagcaagcacgagcaggagcacatcattgctgcctacagctttgagctgggcaaggtcgagcgcgagtttatccgtgcgcgtcaggtcaacgagatcctggctaatatcgaccttgaactggccaaacgcgtggcgcagaacctggggctgcccgcgccgaccaaaggcacggtgccggtacgtaaaacccagccggagcgttcgcctgcgctgagccaggcgaatttgctgccgggcgatatcaagacccgcaaggtggcgatcctggcagccaacggggtggacggggcggcgattgctgcattgaagaaggcgctgcaggccgaaggtgcgcatgccaagctgctggggccgacctcggcgccggtgaagacggccgatggcaagagcctgccggtggatgcatcgatggaaggcctgccgtcggttgcgtttgatgcagtgttcatccctggcgggaaagattcggtgaaggcgctgagtggcgatggggtggcgctgcattacgtgctggaggcgtacaagcacctgaaggcgattgccgtggccagtgatgccaagcctctgttggatctgctgaagcttgaggcggatgcggggttgatcgtgggcgcggacgctaaggcgttcaaggcgttctttgccgcgattgggcagcatcgggtgtgggatcgtgaggcgaaggccaaggcgattccggcttaagtctttggttgtttgttagattgtcatcgggggcaagccccctcccacattttgagctgtgaatacattaaaagtgtgggagggggctttcccccgatggttttattccgccttgcgcggaatcagcacaacctgcgccggaatcttcttcagaatctgccggtgaatcttcaggtcataccccgaatcaattcgcttcacccgtttggtcagcaacgtggccagccatgggtaatcctctgtgcgcggcgcctggatgcttacatcgcactggtaattcaccacgtcggtggcaatggcatccagctgatggcgcagttcttcgatgttggtgaggttcagtgccacggtggtgctgggtgccgtcgggtcgatgaccttggcggcgggcttggcttcggcggctttcaggtcggcttcggctttgtccagctcggccttgcgcgcatggctgatggcgctgttgaccccaccggtcagcgcgggtgccttgggcatcagggcgcgggcacggctaagggcggtcgcggcggcgtttacatcacccttttgcagcacgatctggctgcgttgcaagtaggcttcggccaattgccgctggtaggtttccagcgttgggtcgttgggcgattgggcttgcagcgccgccaattggtcctcggcagtggcaagctcgctgctgaccaggttttgctccagctgtgcgatggccgcagcgcgtgcgtccggggcctctgggacggcgggcggtgtgctttgacaggcgcccagcagcagggaaaatgcggcaaggagcagataacgggaggtgaacggcttcattcctgcgactctctatttgcgcaaaaagcgagcaagtctacacccctcgacggggcaggacaaaactcagcagaaacagggcggcggccgtgaccacaatcgacggcccggccggcgtgtccttgaaccaggacaacgccaggcccccgcacacagcgagcatccccagcaggctggcgcccaccgccatctgctccggtgagcgggcgtggcgctgggcagcggccgcgggaatgatcagcagcgacgtgatcaacaatacgccgacaatcttcatcgcgacagcgatcaccacggcgatcaacaacatcagggccatgcgcagggccggcacgggcaagccttctaccgtagccagttcttcatgcacggtaatcgccagcagcgggcgccacagggcgaccagcagcaccagtacagccgcgctgccgccgaggatccaggcaaggtcgccggggctgatcgccagcaggtcgccgaacaggtaggccatcaagtcgatgcgcacttcatgcatgaagctcagcaccaccaggcccagggacagggtgcttggcgccaggatgccgagcaaggtgtcggaggccaggggctggcgctgttgcagggtcaccagcagtaccgccaacaacaggcagccgactgtcacggcgatggtcgggctgacatccaacagaaagcccagggccacgcccagcaacgcggcgtgcgacaaggtgtcgccaaaataggccatgcgccgccagaccacaaacgagcccaatgggcccgccaccaacgccaaagccaagcctgccagcagggcgtagagcagaaaatcagccatgcttgcagctatctccatgaacgtgggtgtgaggggcggcggggtcatcgacgacggcgccgtgcagatcgtgggcgtggtcatgatgatggtggtagatcgccaggctctgggcgttcttgccgaacagctcgacgaacgccgggtcgccgctgacctgttccggatggcccgagcagcacacgtggcggttgaggcacaccacctgatcggtggtgctcatcaccaggtgcaaatcgtgggacaccatcagcacaccgcaaccatgacggtcgcgcaggcgggtgatgaggctgtacagctcggcctggccggcgacgtcgacgccctgcacgggctcatccagcaccagcaactccggctcgcgcagcagggcgcgcgccagcagcacgcgctgcatttcgccgccggaaatgctttgcactgggctgtcgatcacctgttcggcaccgacttccttgagcgcagcctgggcgcgtgcacggtccacgccaggcaccaggcgcaggaaacgcaggacggacaatggcagggtcggatccacatgcagtttctgcggcatgtagccaacacgcagcctgggcttgcgccacacactgccggtgtcgggcttgagcaggcccagcacggcgcgcaccagggtggtcttgccggcgccgttggggccgatcagggtaacgatctgccccggttccacgctcagtgcgatgttatccagcacgttttgcccggcgaacgtgaccccgacctgttccaggcggattaacgcgttgctcatcaagccccctggcagcccgagcacaggccgaccacttcgaccgtttgcccttcgacccggaagccgacctcggcagaacttttgatgatggcgtcgctgatgcttttttgttcaagctcgatggcggcgtggcactcgcggcagatcaggaactggccctggtgtgcgtgttccgggtggctgcagccgacgaaggcgttcagcgaggcgattcggtgcaccaggccgttttccagcaggaaatccagcgcgcggtacacggtaggcggcgcggcgcggcggccgtcctgctcgctgagcacgccgagaatgtcgtaggcgcccagcggcttgtggctctgccacaccaattccagcacgcggcgacgcagtgcggtcaggcgcagacccttctgtgtgcacagggtgtcggcctccgacagcgcggtatgcacgcagtgagagtggtcgtggggacggctggcaagcggtgttttaggcatgagcggcgacagatatttgatagagacgttattatgttacccgttcctacgccattgagtggtcatcgtgtcccgactttttcccgtttttgtcgtatttgtcaccagtttgttcattactggcgccgctcaggccgaggtcaaggtgttgaccagcatcaagccgttgcagttgatcgcagcggctgtacaggacggtgtggcggttccggaggtgctgttgccacccggcgcgtcgccgcataactatgcgttgcgtccatccgacgtacggcgtgtgcagtcggttgacctgctgtactggatcggcccggatatggagagtttcctgccccgtgtgctgaaaggtcgtgcggctgcaactgtggcggtgcaggatctgccggacatgaagttgcgtcgttttgccgaagatagccactcacacgccgatgaagccgacgagcatgatcacgatcaccgcccaggcagcctcgatgcgcacttgtggctgtctaccgtcaacgcacgtgtgattgctgcgcgcatggcgactgacctggccgccgccgaccccgccaacgccgcgcgttaccagagcaacgtgaaggccttcgacgagcgcctggatgccctggatgctcgcctgaaagcccgccttgcgccgatcgatggcaagccttacttcgtgttccacgaagccttcgattacttcgaagacgcttatgggctcaagcatgccggtgtgttcagcgtggcagctgaggtccagccgggcgcccagcatgtggcggcgatgcgcacccgtttgcaggaagtgggcaagacgtgtgtgttcagtgaaccgccattgcgtccgcgcctggctgaaacgctggtggccgggttgccggtgaagttggcggagttggatgcgctggggggttacacgccggccacggctcagggttatgagcaggtgctggataagttgggcaacgatctggcgggttgcctggagtcactctgacagcaaacgacgaccaaatgtgggagggggcttgcccccgatggcggtgtgtcagtcactaatatttcgactgattcactgcaatcgggggcaagccccctcccacattttttgatctcacaggtctttagagggcaaatggcagttgcacggtgacctgctgacgctgcaccagccgatgctcgaactccgccgggtcatggatcaacacatcctgcccggcaaacgactcagcggcgatcaggcgtgacagccagaaccgcacacaggccacgcgcaacatcgtcggccacagttctgcctctttcgcggtaaacggccgcagccccgcatacgcccccagcaatgcccgggcgcgttgcccatcgatcacgccatcggcgtccgagcaccagtcattcagggcgattgccacgtcgtacaacatcgggccggagcaggcgttgtagaagtcgatcaggccggtgaggtgcgtgccttcgaacattgcgttgtcgcggaacaggtcggcgtgcacattggcgcgcggcagggcgaggatctcggccttgtgcgctgcgatctcggtcagggcatcttgcagcaggcgctgctgtgcggcgttcaggtgcgaaatcagttgcgcaccttcactgagcatccagtccaggccgcgatcggtcttgcgttcgaggactttctcgccctgcgtggccaggtgcagatggcccagcaggtcgccgacctgggcgcagtgctgagcgttggcatccttgatgtgcttgccggccagacgcggttgcagcagcgccggtttgcctttgagttcgcgcaaggctacgccgtcggtggtgcgcagggcgtaaggcaccggcaggtcggcgtcgtggagcacgtcgagcagttcgatgaagaacggcatttccgcaaccgggccgcgctcgaccagggtaaggacgaactcaccctgctccaggctgacaaaaaaattggtgttttcgctaccggcggcaatcccctggaagtcgatcaggcggccgaggcggtaaggggcaagaaaggtttccagctcgggccgagccaggggggtgaacacagacatggttaaaactgccagtacgggcgccgcggtgcgcggcgccaattgaagttaagaaatcatttccattcgaagatcttccatgacgggatcagcatatccggctggtcagaacggatgaagttcgcatcggttccgtccgcacgcaccaggaaatacggcggtgcgccttttacagtcaccttgatcgcgtacaggaaaccgttttggcgatattcctggatagttctgtcgccttccgtgcgaatggtcacttccggatcacccgaaggcgcgctgtccgccgccatggcagccatcggagtgagtgcaatcaagccagtcaacagcaggcgattgaatgtacgcatgataaccttgtccctttgtcgtcattggtccggctattctagcgcctgacccgccgaaaaggttgattctgctcatgagccaagcacccctcgtcctggtggacggttcttcctatctgtaccgcgccttccatgcgttgccaccgctgaccacctctaaaggcctgcctaccggcgcggtcaagggcgtgttgaacatgctcaagagcctgcgcaagcagtacccgggtagccccttcgcggtggtgttcgacgccaagggtgggacctttcgcgatgatatgtacgccgaatacaaggccaaccgcccgagcatgcccgatgacatgcgcgtgcaaatcgagccgttgcaccagagtgtgatcgcactgggcttcccgttgctgtgcgtcgaaggcgtcgaggccgatgacgtgatcggcaccctggcgcgcagcagtgcggcggctgaccgcccggtggtgatctccaccggcgacaaggacatggcgcaactggtcgacgggcacattaccttggtcaacaccatgaccggtagcgcgatggacatcgagggcgtgaaggagaaattcggtgtcgctcccgagcagatcatcgactatctggcgctgatgggcgattcgtccgacaacataccgggcgttccgggcattggcccgaagactgcttccggcttgctggtcggcgtgaacggcggcatcaaagagctttatgagcagctggatatcgtgccgaccttgcctatccgtggcgccaagacgctgccggccaagctggaagagcatcgggagagtgcttttctttcctaccagttggcgacgatcaagtgtgatgtgccgttggatgttggcctggatgatctgcacctgaccgagccggatcgcgagaagctgctggagttgtacacgttgctggagttcaagagctggattgatgagatccagcgcgacgccaagcgtttggagctcaaggctgcgccggttgccgaggaagctgttgaggcggcagcaccggcagagaccctctacaccaccatcctcgaccaggcgacgttcgacatctggttgaagaagctcaacgacgcgaagttgttcgccttcgacaccgaaaccaccggtatcgatgcccagcaggcgcagttggtcggcgtctccttcgctgtgcaggcccatgaggcggcctacatcccgctgacccattcctacatcggcgcgccggagcagttggaccgcgacactgtgctgctggccctgaaaccgctgctggaagacccgaccaagctcaaggtcggtcagcacgccaagttcgacatgaacatcctggccaactgcgccatcggtggcgacccggcgcagggcatcaccgtgcgcggcatcgcgttcgacaccatgcttgaatcctatgtgctgaactccacggcaacccgccatgacatggacagcctggccaagaagtacctggactacgacaccgtcgccttccaggacatcgccggcaggggcgccaagcagttgaccttcgaccagatcgccctggagcaggccggcccttatgcggccgaagatgccgatgtgaccttgcgtctgcaccaggcgttgtttgcacagctgacggccatcccgagcctggcgagtgtactcacggatatcgagattccattggtatcggtgttggcccgtatcgagcgtcagggtgcgctggtggacaaggacctgctaggtgtccagagcatcgagctgggcaacaagatggtcgagctggagcgtcaggcgttcgagattgccggtgaagaattcaacctgggctcgcccaagcagctcggcgcgattctttacgaaaaactcggcctgccggtactgaaaaaaaccggcaagggccaggcgtccaccgccgaagaagtgctggccaagttggctgaagatgactacccgttgcccaaggtgctgatgcagtaccgcagcatgagcaagctgaaaagcacctacaccgaccgcctgccggaacagatcaacccgcgcacagggcgtatccacacctcctatcaccaggcggtggcggcgaccggccgcttgtcttccagtgatccgaatctgcaaaacatcccggtgcgcaccgccgaagggcggcggattcgccaggcgtttgtcgcgcccaacggctataagctgctggcggcggactattcgcagatcgagctgaggatcatggcgcacctgtccaaggacgaaggcttgatgaacgcctttcgtcacaacctggacgtgcacaccgccacggccgccgaggtgttcaaggttgagctgggcgaggtcacctccgaccagcgtcgcagtgccaaggcgatcaacttcggtctgatctacggcatgggcgcgcagaagctgggcaaggatattggcgtcgataccaagacggccaaggcctacatcgatgtgtatttcgcccgttatcccggggttcgcgagtacatggagcgcacccgcgcccaggcggcagaccagggttacgtggaaaccttcttcggccgccgcctgtacttgcccgacatcaactccaacaagccccaggagcgcgcggccgctgagcgcaccgcgatcaacgcgccgatgcagggcactgccgcagatatcatcaagaaagccatggtgctggtggacaactggctgacggattcgggcctggatgccaaggtgatcctgcaggtgcacgatgaattggtactggaggtgcgtgaggactcggtggcggaggtcagcgagaagattcgcgagcacatgagtgcggctgcgaagctggacgtaccgctgctggtggaagtgggtgtgggcaataactgggatgaagcgcactgatttgcgggctctgccatcgcgttgagtggtggcagagtgctttagtgcggaaatcactgtcggttatttcaaatagtttttctggcctgccggaacttaacccgtgaactgctactcagagttactgaatgggtggtgaagcccttcaatgctcctatgttgtgttaagtgttggcagatatctggaccccgccctagcggtccggaacttgaaccccgaacttcccctccccatacgaagtccggggttttttttgcctgcagaaaagttattccgcgagttccgcgcccttgtccgccaattccatccagccagccagcacggtgtaagcctcttccaggcccatgcgctttggtgccgagaacagctggatagtgatcgcgtcgccccagcctttacggatttcggactgcactttgagcaaggtgttcttggccgcgccgtaggtgagcttgtctgccttggtcaacaggatatgcatcggcatgccgctggcgaccgtccaatcgagcatcaacaggtcgaaatcggtcatcggatggcggatgtccatcatcagaatcaaacctttcaaactctcccggccacccaggtaagcctccaggtgacgctgccagtgcagcttcaacgggataggtacttttgcgtaaccgtagcccggcaggtcgaccagacgccgatcatcgtctagcttgaagaaattgaggagttgcgtgcggcccggggttttcgaggtgcgtgccaggctggcgtgagtcagggtgttcagtgcgctggacttaccggcgttggaacgaccggcaaaggcgacttcaaagccttcgtcatcggggcattggtcaactttggcggcgctgagcatgaacgtggactgttggcacaggccgaggatgggattcttgagttgcatgagatttccgatgtgggcggtgccgagaaagggtgcggcaagcggtgtcgtttccgtttcagtagcgccagtatataatgccgcagattttgtgtgtgctttgtcccagcgaaggatgaagttcacgggagcgatagacctttattgcgcattagaacgcaaaacgctctcaaaccctgaaatggtcgacgtatgaccaggtggttgctcgctatcggtgtcctggtcccgctttgcggcgctcaggctacacaggatccggaagcggtgtacaaccgagtttgcgtggcttgccatgccggccagttgcccaacgcccccagacggggtgaccaggcagcctgggcgccaagactggcgcagggcatggacacgctggtgcaacacgtgacccagggtttcaaggcaatgccgccgcgtggtttgtgcatggactgcagtactgaggattaccaggccatcattgaattgatggtgagtaaacccggtagataactcttaaaccccttagccgtagttggattagctgatgaacaaactgatcgtgagtctgctgttgaccttgggcatcaccggtgttgcccatgctgcaggcgacgctacagcgggccaggcgaaagccgccgtatgtggtgcttgccatggaccggatggtaacagcccggcgccgaacttccccaaactggccggccagggcgagcgttacttgaccaagcagatgcaggatatcaagtccggcaagcgcacggtcctggaaatgaccggcttgttgaccaacctcagcgatcaggacctggcagacatcgcggcgtattttgccagccagaaaggcagtgtgggagctgctgatccgaaactggtggcccgcggcgagaaactattccgcggcggtgacctggacaaaggcctgcctgcctgcaccggctgccattcgcccaatggcgcgggcatcgccgctgccggcttcccgcacttgagtggccagcacgccacctacatcgccaagcagctgactgatttccgcaaggaagaggccgggcgcacaaacgatggcgacgcagcgatcatgcgcaccatcgcgcgcaagctgagtgacgaggacattgcggcggtctccagctacatccagggcctgcactgaggtgcacgcaacgttaacactcgattaatcccgtgatgcaagcataaaaagggtggcccaggccgcccttttttgtggccggtgccgttacactaacgaactcatgcccgcgtagacctgtcacaacaaaggtcgcgtgaggcgactttatttgtccaggagtaaagcatgcgtaatctgatcctcagcgccgctctcgtcactgccagcctcttcggcatgaccgcacaagctgccgacgtgccgcttgaagccggtaagacctacgttgaattggccaacccggttccggtttccgagcctggcaagatcgaagtggtggagctgttctggtatggctgcccgcattgctacgcttttgaaccgaccatcaacccatgggttgaaaagctgcccaaggacgtgaacttcaagcgcatcccggccatgttcggcggtccatgggatgcccacggccaactgttcctgaccctggaagccatgggtgtggagcacaaggtccacaacgcggttttcgacgcgatccagaagcaaggcaagcgcctgaccaagcctgacgaaatggctgacttcgtggccacccagggtgtcgacaaggacaagttcctggccaccttcaactccttcgccatccagggccagatcaagcaggccaaggagctggcgcagaagtacggtgtgcaaggcgttccaaccatgatcgtcaacggcaagtaccgtttcgacctgggcacttccggtggtcctgagcagaccctcaatgtggccgaccaactgatcgccaaagagcgcgcagccaagtaaggggcccgtcatgcgccgctggggtaccgaacgtgtggttggcctgcatgatccgcaggtcaacgaacatcacctggagtccacgggcctgccggcagacagtcgtctgcgcctgctcagcttcaatatccaggtaggcatcagtaccgagaagtatcggcattacctcacccgtggctggcagcacctgctgccccacaacgggcgtgctggcaacttgcaaaaaatcggcaacctgctgaacgacttcgacctggtcgccctgcaggaagctgatggcggcagcatgcgctccggctatatcaaccaggtggaacacctggcccagctgggtgccttcccctactggtatcagcagctcaaccgtaacctcgggcgcctggcgcagcacagcaatggtgtgctcagtcgcttgaagccctcagtcatcgaagatcacccgttacccggacccaaggggcggggtgcgatcctcgtgcgctttggcgaaggcccggaggccttggtggtcgtgatgatgcacctggcactgggtgcgcgtactcgcacgatgcaactggcttacatccgcgagcttattggcaattacaaacaccaggtgctgatgggggacatgaatacccacgccagcgacctgttgcagaattctccgttgcgcgacctcgggctactggcaccgcaagctgaagccacgtttcccagctggcgcccgcaacgctgtctagaccatatcctgctcagtcctaccctcacactcgagagcgtgcaggtgctggcgcagcccatctccgatcacctgccggtcgcggtagagattcgtctgccgggttcgctcacggctgatgcattacccgcgttgagcccaggcccccgcggaccccttgcatgagcgacgacgcccagcgctggaaagagaaatacctcaagagcatcgagcaacaagagaaactcgaacgtcgctgggctgcccgtctcgacctgctgcgccgtggactggtgcgcagcacgctggcggctgagggcactgatcgcgcagtcgaccaatgcatgaaggaaatgcgcgacgttgtccgtaccgatgacatggacgccgccctcgctgccttgctgccgcgcctggaaaaagctgtgctggactccgagcagcgccgcgaaacccgggtcgaccagatcagcaccgcgctgacgtcgctggtcacgcaactacagaaacttccgttgccccgtgaggtggcccggccgctgaagacgttcgccaagcagttggacggccgcgtcggccaggcgcgagagatcccgctgttgctcagcgagttgagcggcctgcaaggccaggcgctgaacaacctggagccggacggcgaagctgcgcgaccagggcctgggcttttgcagcgcctgttcggtgccaaggaagttgcgaacgaggcggtggcagacgaatcgacaccccgaccggccccgcagcctgcggcagccaagccagtcgctgtcgagccacagccgtccgagcaatccgaggaactgacgcaagcgttgcgtgcctttgcgccgcagcctcaagaaacggtcgctcctgtcatcgagcccgtagcccccacccaggtggtcgagccctccagcgaaacctcggtctatgaagccccgcctcaagccttagcgattgagacacccgttgcgcgtgtcgagcctaagcctcaagtcgaagaacctgcagcggaaagcgccctcgccgccttcatcgaaacgcctgaagtgcaggtcgagaccccggatgagaccaccattggcagcttgtcgctccctccagtgctggaggagcctgatcctgacgagctgcaagcggatggagcctatgccctgcccgactcaccggagccgtcctatagctccgtggccaagcacatcgaagacaccctgctcggcctgctcgaagaactctcgttacccgagcgtcaccgcccccaggccgaagccatgcgcgagcgcctggcccacggcttgaactggtacgagctgttgccgatcctcgacgacctggcagtcttgatgctggcgatcaccgacagcggccagcatgagttcgaggcttacctcaagcagttaaacgagcgcctcgaggcgttccagggccacttgcaagtcgccagcgaggggcatgccgacagccgctccgccgcccgtgagctggacacgcagatccgcgaacaggtcgatggcctgcaaagcagcgtgcaggaagccgccgacctggacagcctcaagcacgtgttggaaagccatctggaggggctgctcggcaccatggatgagcaccagcagcagcgcgacctgcgcgagcaggagacggcggcgcgcctgaagggcttggctgagcgggttgccaatatggagcaagaggcccagggctatcgcgagcacctggaggtgcagcgccagaaggcgttgatcgatccgctcacgggcctgcccaatcgtgccgcctggagcgagcgcctcgattatgaggtgaacacctggcaccagcgcggcaataacctgtcgctggcgatgctggacctggatcacttcaagcgtatcaacgatggttacggccacctcgctggcgacaaggtgctgaagatcatcgccaacgtgctgcgcaagcgcctgcgcccgaccgactttatcgcgcgctttgggggtgaagagtttgtgttgctgatgcccgactcatccctggcggatgccctggccgtgggcgaggtgttgcgtgcggcgattgaagcgtgcccgtttcacttcaagggcgagccggtgacgatcaccgtgtccatgggcgtggcgcagttccagccgggagagcgcagtgacctggcgctcaagcgtgccgacgaagcgttgtatcgggccaaggccgccgggcgaaaccaggtgcaggccgcctgaaagatgttccattttgtgatttgaccgctggctcgcgatcggtacgttacactgttgcattatcgtcttctgcgtaacgtctaccgccatgaaatccttgtacttcgcttttgtgttcattctgctcgcaggctgtgccagcggccctcgcctggacaccagccacccctcggtgaaccacgacaaccgcatgcagttcgtagtcgtgcattacacctccaccaaccttgagcgctccctggccttgctcacccatggtcaggtcagcagccattacctgatcggcgacgacgcctcggccaccatctacaagctggtggacgagagccagcgcgcctggcatgccggggaaagcgaatggatgggccgcacctggctcaactccagctcgattggcatcgagatcgtcaatcctggctacaaggacacacctacgggccgcttgtggtacccctactcagaggcgcaggtgaagtccctggtggtgttgctcaaggacatcagcaagcgcaatggtatcgaccccaagaacattattggccacagcgatattgcgccgttgcgcaagcttgatccgggcccgttgttcccctggaagcggctggccgccgaagggttgggcgtttggccggatgcccaggccgttgcgcgcttccaggtgcaatacgccgccgagctgccaagcgtcacctggttccaggaagaactggcccgcctgggctaccagacgccgcagaccggcgagttggatgtggccacgcgccatgtgatcgcagcgttccagatgcatttccggccgtcgctgtttgatggcacgccagatgcggaaagtgccgcgatcctgcgagcgttgaaccgaagctagagtggcaacgccatatagaactgagtgccctgccctggccgcgagtacacgcccatgcggccgccgtgcaattgcacgatttccttgcacagcgccagccccaggccggcgccgcctttcttgcggcccacctggacaaagggttcgaagatccgtccctgctgcccataggcgatgccttcgccgttatcctcgacgctgacgatcactcgctcgccatggcgccgtgcctgcaggcgtatctgcccgcccgcgggagtgtggcgcagggcgttgcccagtagattgtcgagcacccgctccagttggacttggtccgcatatagccgaggcaggtcggattgggcttccaccagcagttcgatattttgcgcgttggctggctcggcgaagcgtgctcgggcgtgttcgagcagatcggtgacgtcgcacggccccagcgtgagtttctgcagtccattctgatagcgcgaaaagttgagcaggtcgttgatcaactgcatcaagcgctgcatctcttcattgacggtatccagcaagtccgcttcgcgggactccgccgggaacttcgcacgctcgcggaacagcccgaaggccatatgcatgccggtcaccggcgtacgcagctcatgggaggcgcgcaatacgaactcgctgcgcacccgctcgaaggcgcgttgttcggttacgtcgtgcagcaccatcactgcgccaagaatatgcccctgggtatggctcaccggggtcaggctgtaggtcagcagacgcagttcgccctcgacctccacttccaggtcgtccggcgcgcgctccaggttgccgccgcgcagcaccagttgcagttgttcatccagctccggacgcgacaaggcttcgcccaggccttggccgaggcgctcctcgtcccaacccagttggcgctgggccacagggttgaggtgctccaggcgaccttggcggtcaatcatcagtaagccatcgtcgatgctgtcgagcacggcctgcaggcgctgctggccggccagcagttcatcgacattggtcgcctgatgctggcgcagcgcctcggccatgatgccgaagcggcgggtcagctggttcatttccgctgccgaggagatcggcagcgttacctcaaaatccccttgtccgattttatctgccgctttggccagtgcttcgattggtccaccaaaacgccgggcgatgccatgggccgtcacaaatccgatgatcagtacagcaagccccaccaaccccagcaaaccggcgatccacaacgcgcgttcgcgggacttgtgctcgctgttgctgatgttttccaaggcctgcttgtgttcggcgatcaggccattgcgcagcgtgttgaaggtgtcggtgagtttgtccttggcgccgggtggtggcgtcggttgctgggactcgtcaaaggcctcaagcagcgcctgatactggcctcgagcctggctgaagcccgttccgcgaccgtcacgctgttcatgggcaataccctgatccagcaggtcgaagtagcgctgtttcgaggtttgcagcgcctcggggtccgggcgctcctccagcatcatgatcaactgatcgcccaggctctgacgcagcttgaggcccaggtccagagtgacgaagttgctgcgaatcagagactcctgggtcttggccatttgcatgacgctcaccagacccaggatcagacccaacagggcgacggtaatcagcgctgagatgctcaggaataaccgagtgcgcaacttcatcgctagcttcatagggtacagctcacaggttgtactgtttgcgtttgcggtacagggtcgacgcgtcgatgcccagggtgcgggccgcctgatccagggtgtcgctggtagcgagcacggcgcctatatgggctttctccaactggtccaggctgagtgccgcgccaatccgtggggcattgttgctaggttgttcggacatccccaggtggctgatttccaccttctcttgcgggcaaatgatgctggcgcgctccaccacgttgcgcagttcgcgaatgttgcccggccagcggtagttgagcagcgcttcacgcgcttcatcgctgaaaccccgtgctggacgggcatattccttgacgaagcgcgccaggaaccggtcggccaaggtcaggatgtcttcactgcgctcgcgcaacggcggtagatgcaaagtgatcacgttgaggcggtacagcaagtcttcacggaagcggccgtcgcgcaccatgtcttccaagttcaggttggtggcggcgagaatgcgcacatcggcacggcgggtgacggggtcacccacacgctcgtactccttgtcctggataaaccgcagcaacttgggttgcaaggtgaggggaaagtcgccgatctcatcgagaaacagcgtgccgccgtccgcttggttgacgcggcccagggtactttcactggcgccggtaaacgcccctcggctatggccgaacagttcgctttccatcagttctgccgtcagcgacgggcagttaatggtcacgcaggattttttcgagcgcttgctccaaccgtgaatagcgcgggccagttcacctttaccggtaccggactcgcccagaatcagaatgttggcgtctgtcccggccacctggcgcgccgtttccagcaccaccatcattgatgggctgtgagagtcgaggccgtctttcggctggcgcacttcgccctccagggcttcgagccgcgcagacagttggcgcacttccaactgcttggcggtggccaggcgcagttgatcggggctgcagggttttaccaggtagtcagcggcgccggcctggatagcatcgacggcggtatcgactgccgaatgggcggtgacgatcaccacgcgcatccagggcgcctggattcgcatctgggccagcacatccaggccattgtcttcgcccaggcgcaagtccaggaagcacaggtcgaatacctggcgttgcatcaaggcgtcggcctgggccgcgctgttcgcagtggcgacggtgtagccttcatcttccaggcaataacggaaggtgcggaggatcgcggactcatcgtccactaaaagaatgcggccttgaagttccttggctgattccatctgtcccgcgctccttaaactatgaatgatggtgtttagtcccggaataatcgggcaagttgcatggtttattctgatcgataaatagcagtctcgtgcaggtatctgcatcacttcctacaaagccccgtctgatggcgttttcatgccgtcttgccacttcggcaacaccctcttcgttttctatccctcgacccgaccgctggccatcgtgcatttcgcacggcatacacggaggcatcgtgcaggatgctggagggtgcatgagtctttagttcataactatctgattttattgagttttattttgtaaaaaaactggcacgcactctgcaatagctcttccaacgaataatcaaaatgcgggagaacaacagcatgactcgccaaagcctcagcgaactgcgtgtatcgccactgcgcttgcagcaaggtctgtttgccagcttggccctgatggtcacgctgatcggtggccagcagttgcaacattggcagcagagtcagcagcagatcccccagtttgaacgtccggccatgacccagacccatttccgttccgttggcagtgttgctgccgatgcaacagccccgcaattgcggatggttgaccaggcgtcgcccctgagtgagctgccatcccaagagcgttgggtgttctaggcaccaaaggccgcttgtgttgagcggcagcacggcaccacccctgttatttctatagatgcgtaaggagaatcaccatgttgagttgggcaatcacatttctgatcatcgccattgtggctgcagtcctgggcttcggtggtatcgcgggcaccgccacgggtatcgcaaaaattctgtttgtggttttcctggtgatgttcatcgcttccttcttctttggtcgtcgcggccgaggctgaaaatgaccactttgtccttcaaagccattactgccgccctgcttctgggcggtagcggcttggcgttggccgccaacgacggccagtcccgagccaacgaattgctgagcgcggacccgcaataccgtgaaacctggcaagacgtggtgaagaaagaagagcgcctgccggaatgggtgatgaacctgtccggcgccgccgagcagatgaatgccgtggaagaagatggcgacaagtatttggtcgggccactctgcgaaaccgctgacacctgcctgaacaagcgcctgatcgttgccttcagtctcgacaaagaagatgcctacgccatgttggtggaagtcccggccggtctgccgaaggacaagtcgccgacgcggcacgccgattaccggtttatcggtaagccggatgaaggcatgcaaaagctgctgatggagcagctgaagaaagatccgaattggtactaggttccgtctgacacgcttgttgtctgcggggccggcgtccatagaaagaagccgtcgcttctttctgtttgcaccgctcgccaagggtggtgcatgaccaaggggccgggttgctctgatcacctgcgatcggcgtgacctacgggtacagggagtgcctgcgcaagggccgggtcaggcaaaaagctgcggcgcaggttcacaagccaacggcttgctgaacttgcgacgggctttaacgctccttctctgcttctcatgccgcccgtagtcgtgatttccttttttgcttgtgcccaaccattacttggtgtgtcgggtagaccatctatcgataaaatttggtgggcgccataggacatttccgacactaaactgtggaattctcaggcatttccgccaacgctccgcagacgtcctgaatctctgagcgagccgggtttggccggttcacggcatttttgtcggacaaaatgtcacatttgaactgaccgttcggacagttattattaaaaaatctcatgccgattcggcatagggtaggcgtttacggcattagacgtcgcccccttgcatgggaatagttgcgccttttttcgcctgccagtaagccatttcggccacgctgcggtgaccttccatggaggcagatgcacacactttttcgctctcgagcgttgcggctggcgcatttgccttaagttcacttgaagtaagggtaatgacatgaagaaggcaaagctaagcctcgcctggcagatcctcatcggtttggtgctggggatcgcaatcggtgcagtgcttaaccatttcagtgctgaaaaggcctggtggatcagcaatgtgttgcagccagcgggcgatatctttatccgcctgatcaagatgatcgtgatcccgattgtgatttcctcgctgatcgtcggcatcgccggtgtcggtgacgcgaagaaactcgggcgcatcggcgtcaagactatcctttacttcgagatcgtcaccaccatcgctatcgtggtcggcctgctgctggccaacctgttccacccgggcgcgggtatcgacatgagtaccctgggtaccgtcgacatctccaagtacaccgccaccgccgccgaagtgcagcatgagcatgcgttcatccagaccatcctcaacctgatcccgtcgaacatctttgccgccgtcgcccgtggcgagatgctgccgatcatcttcttctcggtgctgttcggccttggtttgtcgagcctcaagcctgagctgcgtgagcctctggtaaccatgttccagggcgtgtccgagagcatgttcaaagtcacccacatgatcatgaagtacgcccccatcggcgtgttcgcactgatcgcggtgaccgtcgccaacttcggcttcgcctcgctgctgccactggccaagctggtgatcctggtttacgtcgccatcctgttcttcgcttttgtgatcctcggcctgattgcccgcctgttcggcttctcggtgatcaagctgatgcgcatcttcaaggatgagctggtactggcctactccactgccagttccgaaaccgtgttgccgcgtgtgatcgagaagatggaagcctacggcgcgccgaaagccatttgcagtttcgtggtgccgaccggttactcgttcaacctcgacggttcgaccctgtaccagagcatcgcggcgatcttcattgcccagctgtatggcatcgacctgtcgatcggccagcaactgatgctggtgctgaccctgatggtcacctccaagggcatcgccggcgtaccgggtgtgtccttcgtagtgctgctggccaccctgggcagcgtgggcattccgctggaaggcctggcgttcatcgctggtgtcgaccgcatcatggacatggcgcgcaccgccctgaacgtgatcggcaacgccctggccgtgctggtgatctcccgttgggaaggtatgtacgacgacgccaagggcgagcgctactggaactcgctgccgcactggcgtaccaagaccgccgcaccggtcgcccaggccacccgcagctgacagcgtgacggcttaaagacaaaccccggaaaattccggggtttgtcgtttctgccagccccgctatcattcgccccattcttcgggggattcaactgatgctcaatggcctgtggcttggcttctttgtcgtggcaatggtgtcggcactggcgcaatggctggtcggcggtaacgccgggatttttgcagcgatggtcgaaagcattttcgccatggccaaattgtcggtggaagtcatggtgctgctgttcggcaccctgacgttgtggctgggctttctgcgcatcgccgaaaaggccgggatcgtcgattggctggccaaggccctcggcccgctgttccgccgcctgatgccggaagtgcccgccggccacccggcgatcggcttgatcaccctcaactttgccgccaacggcctgggcctggataacgccgccacccccatcggcctcaaggccatgaaggcgttgcaggagcttaaccccatacccaacaccgccagtaacgcgcagatcctgttcctggtgctcaacgcgtcgtcgctgacgctgttgccggtgaccatcttcatgtaccgcgctcagcaaggtgccgccgacccgacgctggtgttcctgccgattctgctggccaccagcgcatccacgctggtggggctgctctcggtggcgatcatgcagcgcctgcggctatgggacccggtggtgctggcgtacctgattccgggtgcgttggtattgggcggctttatggcgctgctcgcgaccctctccgccacggcgctggccgggctgtcctcgatcctcggcaacctcacattgtttggcctgatcatgctgttcctggggatcggtgcgctgcgcaaggtcaaggtgtacgaggcgtttgtagaaggcgccaaggaaggctttgacgtagccaagaacctgctgccgtacctggtggcgatgctttgcgccgtgggggtgttgcgagcctctggcgcgttggattttggcctggaaggcattcgccatgtggtcggctggacgggcatggacacgcgctttgtcgatgccttgccgaccgcgatggtcaagccgttctccggcagcgccgcgcgggcgatgttgatcgagaccatgcagacccagggcgtggacagctttccggcgttggtggcggcgacgattcagggcagtaccgagaccaccttctatgtgttggcggtgtactttggttcggtgggtattcagcgggccaggcatgccgtgggctgtgcgttgttggcggagtttgccggcgtcgttgcggcgattgcggtgtgctactggttcttcggttaaggctcggattgctatcgggggcaagccccctcccacatttgaatgtgttcacagatcaacctgtgggagggggcttgcccccgatgaggccctcagtgtttagctgcactattgccttgctgaaccacccactccaccacctgcttattcaactgatcccccgcctgtccaaacccagccaccaccgccggcactttggtgtcccccaccggctggtgcacttcgaaccgtcggctggcaataatccgctgatcacgcccgcgcaccaggcgcgcatccaggcgaatcaccacctccaccacactgccatgatattcactctggaacgcctgcaattgcccgcccagttcatagtcggactgcaggttagtgtcatcggtgctcagcagcgtcacccggccatcgcgctggaagccatccataaagcggttgcgcaacagcaccggcgccgggtcgctccagcgtgagttggcatagctgctgatcaggtcgccattgggcaccacggcgatgcgtgggctgtcgagaaactcgctggtctgcggcttgttcacgcgcagtgaccaactgaccggcgcgccctggctggtggtctgcgccgaagccaggcgatacacgtccgaagggtcagccttgggcagaatcgaacacgcgctcacgagcgccagtgctagaggggcaatcagttggtaagcacgcttcatggcgtgaactccttgttcttgtcgctgcccagcaggtaaccgctggggttggcttccaggcggcgggagatggcgcgcagcgagcctagggtttcgcgcagctcgcgcaccgccggcgccagttcgttgaggccttgcatgccgctgttcaccgagtccttgttgttggtcagcaaggtgttgatggtcgcggtgctttgttcaagggatttcatggcctgctcggcgctgccgaaggcctgcttgccttgttcgttgagcaagccattggcgttgcgcatgagcacggtggtctgttccagggcggcggtcgcctgtttgctcacctgcatcagttgctgcatcaccactttgatatcgccacgctgatcggcaatggcgccagtggtttgctgcaggttctccagggtgttgctcaggcgctcgacgttctcgcgggagaacatgtgattggcgttgtgcaacagcaggttgacgctggtcatcaggtcgttgctgttgttgagcaagcgtgcgatgggcgatggcgaggcgatgatctgcggcaggttgccgtccttgcccttgagctcggggctttgcggggtgccgccgctgagctggatgatcgaggtgccggtgatgccggtcagggcgagcttggcctgggtgtcctccttgaccggcgtctgcccggccaggcggatgcgcgccagcacgcggcgcgggtccttggggtccaggctcaggctgatcacatcgcccaccttgatcccgctgtactgcaccgagctgccctgggacaggccgctgaccgcctcgttgaagatcacttcatagtcctggaaggcgctgtcgacgctggacttggccagccacaggccgaacagcatcgcgccgaccaccacgatcacgctgaacagaccgatcatcacatgatgggctcgggtttccatgtcatacctcgttgagcgattgagcggcatccaatgccgcgcggccacgggggccgtggaaatattcgtggatccatgcgtcgtcggtttccgagacaacatcgatggcatcggccaccagcactttcttttgtgccagcaccgccacgcggtcggtaatggtgtacagcgtgtccaggtcgtgggagaccaggaacacgctcaggcctagcgcatcgcgcagggtcaggatcagttggtcgaattgcgccgcgccgatcgggtcgaggccggcggtgggttcgtcgaggaacagaatgtccgggtccagcgccaacgcgcgggccagggcggcgcgcttgatcatgccgccggacagcgaggccgggtatttgtcggccgccgacagcggcagcccggccagggccagtttgacggcggccaagtgctcggcgtcgcgacggctgaggccggcgtgttcgatcaagggcagcgcaacgttttcggtaacggtcagcgaggaaaacagcgcgcccttctggaacagtacgccaaagcgccgttctaccaaagagcgttcgtgctccggcaagctcggtaggttcttgccgaacacccgcacctcaccttcgctgggacgacgcaggccgacaatgctgcgcaacagcaccgacttgccgctgccggagccgccgaccactgcgaggatctcgcccttgtacaaatccaggtcaaggttttcatgcacgctctggctgccaaagcgattgcacaggccgcgcacttcaatcaccgcctcactgggcgctcggtgtagacggctcaccagcccatctccatgaaaaacagcgcggcgacagcatccatcacgatcaccacaaagatcgattgcaccacgctggaggtggtgtgggcgccgactgattcagcgctgccgctgaccttgaagccttccaggcaaccaatcgcagcgatcaggaacgcaaagatcggcgctttcaccatgcccaccaggaagtgctgcacgccaatgtccgattgcagcagcgagaggaacatcgccggcgaaatatccagggccaccgcgcacaccacgccgccgccgatgatgcccgagagcatcgccaggaacgtcagcatcggcagcgccaccagcagcgccagcacacggggcagtaccagcaactccatcgggtccaggcccagggtgcggatcgcgtcgatttcttcgttggccttcattgagccgatctgtgcggtaaaggcactggcggtgcggccggcgatcaggatggcggtgagcaagacgccgaattcccgtaggaaagagaacgccaccaggtccactgtgaagatcgtcgcaccgaagctcttgagcacggtggcgccgaggaaggctactaccgcacccaccaggaacgtcagcaaagccacgatgggcgcggcatccagtccgacctgttcgaggtgcgcaaccattggcgtcacgcgccagcgcttggggcgcaaaatgctacgggcgaaggtttcgagaatcaggccgacgaaacccaagagtttcttggtgtcctgccagacggtgtccaccgcacggccgatgcgtgcgaggacctggatacccgccgcttcttcaggggctttttccggcacgcaaaaatcattcagggaacggtagacggtcttgagcagcgcgcggtcggcggcagacaagctgcaatcggtttgttcggcggactgctcgatgcgggtcggccccagcagctccaccagcaacgaggcgccggccgtatccagggcgccgaggccgttgaggtcgatgcgcgcgccggcgtcgtattggccgtcgagcttgtccgacagctttttcaggttggcatagtgggcaagcgtccagtcccccgtaatccgcagttgtggtggggtggtggacgtatcgaggtgggctgcgccggccgtcgtgctggtggtcataagctccgagcttgtttggctatccacaattcctacgtaatagcacgatacggcctactttgggttgtccgtttgtgctgagtccgtcaccttgaagcgcagcacgccgatcacttgcccgtcttcggtcagcacccgcacctgccagcggcccacggcgtcggccgggaagttctgcttgtgggtccaggcgcggtagccctctttacgcccgccgtggatatccagggcgatgcggtcgacctcttggccgttgaatttccacacgtggtagatgcgctcatccaggccacgcggcgcgttgatcgcggtataggcatacagcccaccgctgcgcagctgcgcggcagtgacttccttgaggtcgtcgcccggcgtgcggtcctgcagttgggtgctgatggccacttcggtcatccacagggtggctggtggcacccaactgcgcaggagccacccggcgcagccgatggtggcggtgaccccgagcagcatcgcccagcctttgacgctacgcagcggcaagcttaccgccaggcttgggatcgacagtgccatggccacgccgagggccagtttgtaactctcggcggtggtcaggtgcaggatgatcggcaatgccgtgagcagcgcggcgaacagggtcagggtatgcagcgccaggaacagtgagcgcttgggcgccagccacttgtagtacagcgggtcgatgatcgacaccagcgccgccgcgccgagcaagccggtgaataccgattggccgctgttccacgcggtggtgacgaaaaagaacggcagcacaaaaaacagactttcctggtggatcatctgggtcgcgtagcgcagcagcggttcggggatttcgcgcttgaagactttggtgaacagctgggtaaagctgttctccagcatcagccacaaccagctcaccagcatgatcaccgcaatccagctggccatgccctgctggcgatccaccaggatgaagctgcacacacccgagataaaaccgccgagtgcaatcacccctgggtagcgcttcatcagttcgagaacgcgctggattaagtgggtcaggtttggcattcggcgcttcgcagtcttgtaggaaaaatcccagacagaataacgtcttaggccgttgtacggtgggtcattgcacgatccgtttgcgataaacccgcacgccaatcaacacaaaggcgatcagccccagcactccggcgctgatccagctcagcatgtcgtagctgagcagtggtttctcgatgcgccagtaaccgggctgcttgaacacttcgcgcatggcctggttggtctggtccaggctcacggccttgatgcgcttggctgggtcgctgaagtggccgttgttgtattcggcggacgcgctccagtagtagtcggccaaggcgctgttgccttgcacggcccacgcctggcgcgcaatggcggcttgttgcaggcgcgcaaacactgctgggtcgaggccgtccttgagcagtcgggccttgaggtcctggaggacgtgttccgcttcggggaggttttcccgctcaaggtcggcattcaggctgaggaaaccgacgccgccgagtacttcgcgctcgctccagggaccgtaggacaaaccgtgcttgaggcgcagttggcgatacagcgcccagtccaagtagtccttgagcaggtcgtaggtttcatcatgtccgtcatccagcaccggctcggggaacagccagtgcaacttggcgctgttgccgacccagccgtggatcagctcgcgatggctggcagcggcgtgctggatttccggcagcgccggatgctcggtagggtcgaccgggtcgagttggccgtaggtgcgttccaggtaggccggcagcagtttgtcgaggtcgccgacgatgatgagggtcatgttgttgggggcgtaccagtgtgagcgcaggtcgtccagctggtcgcgggtcaggtggtcgacctcagcgcgttcggcgcatttgagccccagttcgacggccaattggttgctggcggtgtggcccaggtcctggcggtccagcaggcgttgcaggtgtgagtagtgaccgccgtcttcgcgctccactacccgcttggccgcgttgatattggcgtcggtcagttcggtgcgggtgatgatcgccagcagcaggtccagcactttgcgctggttttgcgcgggcgcctcgatcacaaaggtggtgtcggcgttgctggtgtaggcgttccactcgccgcccagggcttgcatgcggtcttccagctcggcttcgccgccgccgtcgatgccgctgaatagcaagtgttcgagcaggtgcggcagctctttgtctgcgcagttgaagtcatccaggcctactccgaccaccagacggatggccacatgcccgcgctcggtgcccggtttgagcaacaattgcaggccgttgggcaaggtgtagccctcgacttgcaggcgctcaaaggcaaaggcgtgggcagatcccatgagcaggcaagcgaacaacaggcgacgcataacaagcttcctggcgagtgaggtcatttttaactgacttcacgggccaccgtacgttcagggcgaatgtgtgatgtcggcaatatcttcggcggagagcgcgccggtgtcagacgtttccaacactacataggcactgctgcaaaacaacgagttcaggcgtttcatgtcggcaatcagttccaggtgcagagagctggtttccaggctctggacgatcttgcgctgaaggcggctgacgtgggcgtgggccaggcgccgttcctgggcgcggaagcgacgcttctcgcgcagcaactggcgggcgctttccgggtcggcactgaggaacaccgacaaccccaggcgcaggttggcgatcaactggctgtgcaggccggtgagttcctccaggcccacttcggagaactggcgacgctgagaggttttctgctgctggactttgcgcagcatgcgttcgatcaggtcgccggccagtttaaggttgattgacagttcgatgatctcggcccagcgccgattgtcgtgttcactgaggtcttcccggggcatttgtgccaggtagagtttgatcgcgctgtacagcgcttcgacatcatcgctgaggctgcgcatttcctgggtgatggcggtctgcttgccgcgcagcacttcaagcatggccatgagcatattgtcgatcaggtcgcccaggcgcagggtttcgcgggcagcgttggccagtgccaggctgggtgtggccagcgcggccaggtccaagtggcgtggtttggccttgccattgacctcttcgcgctcaggcagcagccaggcacacaagcgggccatcgggccaatggtcggtaacaggatcaggcaacggctgacgttgtagagcaggtgaaaggtgatgaccatgccttgtgcgctgtagtccaggccatccatccagcgtacgagcgggtcgagcaccgggatgatcagcaacaggccgatcaatttgtacaacaggctgcccagtgccacctggcgtccggcggcgttctgcatgctggtgctgaggaaggccagcacgccgctgccgatgttggcgccgatcaccaggccgatggccacgtgcaggccgatcacaccggcgccggccagtgttgccgtcagcaggacagccgccaggctggagtaggaaatcatcgcgaacagggcgccgaccagggcgtcgagcaggatgtcgccggtcaacgacgcgaagatcactttgacgccctgggcgtgggtaatcggcccggccgcttcaacaatcaattgcagtgcgaggatgatcagcccgaggccgatccccacccggcccaactgccctgctcgcgtttgcttgcgcgacaggaagaaaatcaccccaagaaaaatcagcagcggcgacagccaggacaaatcaaacgtcagcacccgcgccatcagcgcggtaccgacgtcggcgccgagcatggtcgccagggcgggcatcagccccatcaggccctggccgacaaaggaggtgaccagcatcgccgtggcgttgctgctctgcaccatggctgtcaccaggataccggcgataaacgccagccagcgcttggacatgttctgcccgatgacttggcgcaagttggagccgtagacccgcaggatgccggtacggacgatgtgcgtgccccagataagcagggtcacggcggaaagcagattgagcaaggtcagcatgctcggccccccgtgtgggtgcgctcgaaaatgagcgaaggaaagttgccgcgtgccgctctacgtcttgtacttaagctgtagttggcgaatgggttcggcgccagcatcgcatagctaaagtggggattgaaataaaactgtcatgaaatcagctttgtgcggatgaaaaaaaggggcctgtgcaggccccttttttgtctggctcgggattattgacccgggatgtctttgcgcagtttcacaggatcctgctgtttcttctttttcgcgatggcggtgcgcatcttgatgttcactgcttccaccgccagcgagaacgccatggcgaagtagacgtagccttttggcacgtgcacgtcgaaggattcggcgatcagcacggtaccgactaccagcaggaacgacagcgcgagcatcttcaacgacgggtgcttgtcgatgaattcgctgatggtgccggctgccagcatcatcaccaataccgccacgacaatcgccgcgaccatcaccggtacatgggagaccatgccgaccgcggtgatgaccgagtccagggagaacacgatgtcgatgatcgcgatctggatgatggtgtagatgaacttgccaccggcgcccttcggctcgtcgtgggtttcgtcttcaccttccagcgcgtggtacatctcctgggagcttttccacagcaggaacaggccaccgaagaacaggatcaggtcgcgcccggaaatgccttggccgaagaccacgaacaggtcggcggtcagttgcatcacccaggtgatcgacagcagcaacaggatgcgtgtgaccatggccagggccaggccgaagatccgggtgcgtgcctgcatgtgcttgggcatgcggctgaccaggatcgaaatcatgatgatgttatcgatgcccaggacgatctcgagggccgtcagggtgaagaaggcaatccagatttccggattggtcagccattccatgtgtattcctttgagcgagtgttaaaccgcgcaagctgcagcgccgcgcggttgggtgttcgggattatagagtgctgaacagaggaataatccccatcagcaaagcggcgaccattatgcacaggcataccagcactgcccacttgagggtgaagcgctggtgatcgccaaattcgatacctgccaaagcgaccagcaggtaggtcgaaggtaccagtgggctcaacaggtgcaccggttgtccgacgatcgatgcacgtcccatttctgcagccgtgatgccgtagtggctggcggcttcggcgagtactggcaatacgccgtagtagaacgcatcgttggacatgaagaaggtaaacggcatgctcaccagcgcggtgatcaccgccaggtacgggcccagcgcgtcagggataacggccagcaggctcttggacatggcatcgaccatgccggtgcccgacaggatgccggtgaagataccggccgcgaagatcagccccaccaccgccagtacgctgccggagtgggcggcgacgcggtctttttgcatctgcaggcatgggtagttgacgatcatcgcgatactgaatgccaccatgaacagcaccggcagtggcaacaggccggcgatcagtgtgcacatcagggcaaaggtcagggcaccgttgaaccagatcagtttcgggcgacgggcgtccgggaattgcgacacgctgatttcgctgtggtcgatctcgtcgccttgcaggtgcaattcacccaggcgtgcacgttcgcgcaggccgtacatgtaggcaatcaccaggattgcgacgacgccggcggccatggccgggatcatcggcacgaaaatgtccgacgggtccacgtgcagcgcgctggcggcacgggcggtcgggccaccccaaggggtcatgttcatcacgccaccggcaagaatgatcaggccggccatgatccgtgggctcatgccgatgcgctggtacagcggcaacatggcggccacgcagatcatgtaggtggtggcgccgtcaccgtcgagggacaccaccagggccagtacggcggtgccgaccgagactttcagcgggtcgcccttgaccatcttgagaatcttgcgcacggccgggtcgaacaggccggagtcgatcatcagggcaaagtacagaatggcgaacatcagcatcacgccggtgggcgcaagcttggtgataccggccagcatcatcgggccgatctcgggcgcgaagccaccgaacagcgcgaacaggatcggcacgatgatcagggcgatcagcgcggacaggcgcttggtcatgatcaggaacatgaacgtgatgaccatggcaaagccaaggaaagtcagcataggaatactccaggcgtagcgcggctagggaatggcgaaccgggtgcggtcagcgcagaacgaaaggcacgaggcgtacgggtggagttggggcgaacaggcgggtacgggcggacatcgggaatcaccattgttgttgttaacagccggtctgttgccggcagtgggggcgatcctagacgggtaagctttcagccagctttcgctgagtaaacgggtgacgaagggaatgcacgcagtctctggacttacatggaccaaaatgtgggagggggcttgcccccgatagcnnnnnnnnnnnnnnnnnnnnnnnnnnnnnnnnnnnngctatcgggggcaagccccctcccacatttgtctgtatttggcttgaggtttttagggcagttcgaggccgccggcggctttgtgcagcttgcgcaagtgttcgcccaccagcttgaggttggcttcacaggcggcaatctcggctgaacgcgaaggctccagcagcgccctcacctccttgtccaattcgccggtcagcgattgcagctgcttctggcgttcggcgctttccgattccaggcgtgtggcttccgaaggttgcggcaggccatagccgccgctgccgagcagctcagccgggcgactcaggaagccgctgttggcgaggatctgttgcagcgtggcattggctttctccatgccaccgttcttcagctcgcgagcaccgaggtagcgttgtttgacttcgtcctgggccagcatcaattgcttgcgaaagctcgcctgctccagcagcagcaacgcggcgctggtgcgcaagtcggcctggtcgaaccacgggcgacgctcctcagcgctcagggacagccagtcttcaacctgggtctgcttgatcggcaggtgtttgcgcagcacatcgaacatcgcctggtagcgttcgcggaaggagtcgaagtgatagcccaggcgcaatgccctgcgtttgtcgtccagtacgctggtgtcggccaggccgcgtgcgctcagcacctcaagcaaaccattgggggtgatgttgtccaggccggtcagttgcgggttggcactgccgctgcgtagcagtttcaggctctcgaccgcgcagttgttggagatgaagaagtagttgccgtcgtagctccaatgcatttcggcggcatgctcgacggtatcgttgatttcctggcgggtcagtttcaacggcaccgaggccaggccgcgcagctcggtcttggtgtattcatcgatcacttgcgccagcggcagcacgaacagccgcgaggggtacttgccgaccaggccatcccagctcgacagctgtacgtcaccgacgaacgcgcggtaggacaagaccagatgctggtccaggtccagccggcagtccggcccgcgtgggcgccccggtgcgcagatcaccaggcgcagcatgctgtggccccagcggctgaccaggttctggttggcctcggccagcaggtagtcgatctcgtagacgcgctccgggtccacatggcccagcggtgttttggcaaaatcgttaccggcgttgaggaacgcgtaggtgttggcgcaggtgtcttgctgcggcggggcccagccgaagtgttccttgtaatagcggaacagcgcgggacggcggcaggcgtagctcgggtcgaggagaaagtactccatgttgaccgccacaaattccaacgggctggtggtttcgtagatgtccgggctgcgggcgacttgaagattatgttgctcgcgctctccgcgacggcctacgtactgcggccagccggccaggtccagcaggcgtggatcatcgctcaaggtaaagcggcggccattctggccgcggcattgatcaggcaggccgatcaggccggtgaggttgttctggcggctgcagcggttgatcagcgtgcggtcttccttggaccacaggcgcgcacggtcatagatgtgggtcagttcatgcagcaccgtagcgagcatttcccggcgcacagtgccgtgaggtcgattggttttctgggtggcggcactgccgtcggtcaggctggcgagcaggttgctgttgaggtccagctcggacaccagggaggcttgcccgtaggcgttctcgggcatcttgtcggtccagccgacatcaatgcgtcgatccaactgctcgacaaagcgcggcggcaaggaacgcatcgcttcgtcgagcaatgcctggctcgcctgttgctcagccgggctcaggccctcggtcttgagccgcagttgcaggctggcctgggctgcgccggcacacagcagcacagtcccggccaggagccaggcgacgattcgcctcacagtgcgaggatggcttcggcgagggtctggtcgctggcgtcgcgggcttccggcaggcgtgtgcgcagagtgtcgaaggcggcttcaaggtgggcgccacggatctcgccgttgctggcgacgaaactggcggcgtcatcgtgggcttcgcgtacgactttggagtcacggatggaggtggtggtgtccgaggtgaaatcaatggtgcggccggaggcgcggacaatgatgttactggtggccaccagggtgtgtgcctgggcgatgtcggccaacaacagcaggccgagggtggcggcgatcagcgggctacgcatggaataactccagagacaaagatggaatacagagatgattattggacgagaattgcttgcgccagttcaaggtcgctggcgttaagttttggttggctgcggcgcaaataatccagcgcagattccagccttgcgccccgccattggccgtcagtggcgataaacgcggcagcgtcatcctgggcggccattatcacttttctgtcgaagggtgcagacgtcaccttgctggtggcgtaggcgcttgcgacggtgctctgggtggtcaggtcaaaggccgaagccaacggtgaccaaccgaacgaaaacaacacagggacgattaaaaggcggtatgaaaaagccatgggactcgacaactgaaagcgagcgccaaggctagcgcaatgcccgggcgagagccagcgcccaggcgttcgccttggcgtcagatagccaggatggcctgggccagttgtgcgtcagttgccgtgttcaattgcggcgcgtgctggcggatctgggccagggcgctttccagtttcacgccacggatggcgccttcgctggcgacaaagctggcggcgtcgtcacgggcagcacgtacgaccttgttgtcgcgcagggacgaagttgcatcggagctggcgtcggaagtggccttcagcgcgccgacgatggagtcggtggtcacgatgaagctggtcgcgttggcgttggcagccagggccaacagggtggcagcactcagcaggcgaagacgggacatgggatgactcctatagatgaacggataaggtggcgcaggccagccattggggatcagacgcctgtactgcacggtttgccacagggtggctggatattaagccgccgcttatccgttcgggaagcgccttgactgcctagtcacgccagaacggcttggacagctcggccattcgatcgccctggctgatgccgacatcggacaattcccgggtatcaagctgcgacagttggcgtcgttcataagcgtggcgtacccatttggcgagggttgaggccgtttggcgtagcagtctcttataaagaggggatggcgtatccatggcgagtacctttcctgaggtcttggaacaccatgttgggtgagttggtgagaccgatacagatacaccaagataaaattgtactgtttaactgttgcatttttttaaactgtacctgtcgctgcgcagagcttctgttttctgttggaaattcgaatgccgcaaacaacaaagcccgcctccggtttcccggggcgggctttgttttgacaaatcaggttgctggcagtggacccgtcaggtcagggccagcgagcgctaaatcagcgccagaacggcttgctcagctcttcgtagcgttgagcttcgctgatacctgcgtcagccagcagacgcgaatccaggcgagccagttggtggcggctggagatgcggcgctgccacaacatcaggttggcgataacgcgcagaggcagggaggcctgggtgtttacagctttttcttcgaagaacagttcggaactgagtgtacgttccatgatgacatccttccgcttgtggcgggattaggtagtggtttaactgatgccaatgatcctcttccggcgcaagactctctagatacagttcacctgtattgtgaggggccagttaactgtttataggcgctgtactgtacggaattggggcaactgtacctgtctgcactgaaatagtgcggaataggtgttttcggtgaggtgtgtgggatatttcggtaagaaatgaccggtacagcagtacagttttttcaataagtggcggtgaagccaccgagctgatgagactgtatttgcatcagctcggatctgtatcaatcacgccttgagcatgtgcccggtttcttccaggttgatgtgccaactcagtgcttcgcgcaggatgtgcggggtatgcccgccgatggcgcaggcggcatcgaagtaactgttcagcgcatcgcggtaggcggggtgcacacagttgtcgatgatcacccgagcccgttcccgtggcgccaggccacgcaggtcggccaggccaatctcggtcaccaggatgtcgacgtcatgctcggtgtggtcgacgtggctgaccattggcaccacactggaaattgcgccgcccttggcaatcgacttggtaacgaagatcgccaggtgcgcgttgcgtgcgaaatccccggagccgccaatgccgttcatcatccgcgtgccgcagacatgggtggagttgacgttgccgtagatgtcgaactccagcgcggtgttgatgccaatgatgcccaagcgccgcaccacctcagggtggttggagatctcctgcgggcgtagtaccagcttgtccttatagtgttccaggttgccgaacacatcggcattgcggcgctctgacaaggtgatcgaactgcccgaggcgaaactgagcttgccggcgtcgatcaggtcgaaggtcgaatcctgcaacacttccgaatacatggtcaggtcttcgaatggcgactcgatcaacccgcacatcaccgcgttggctatgttgccgataccggcctgcagcggaccgagcttgttggtcatgcgcccggcgtcgacttcctgcttgagaaagttgatcaggtggttggcgataccttgggtgtcgctgtcgggcggcgtcaccgtagaggcggagtcggcctggttggtgatcacgatggccacgatcttttccggtgggatcgggatcgcggtgctgccgatacggtcatcaactttgaccagcgggatcggcgtgcgcgtcggacgataggtcgggatatagatgtcgtgcaacccttccaggttcgggttgtgcgccaagttgatctcgacgatcacctgtttggcaaaaatcgcgaaactggccgagttgcccacagacgtggtgggcacgatatgcccttgttcagtgatcgccactgcttcaatcaccgcgatgtccggcaacttgagttggttgttgcgcagttgctcgacggtttccgacaagtgctggtcgatgaacatcacttcgccggcgttgattgccctacgcagggtgctgtcgacctggaacggcatgcgtcgtgacagtacgcccgcttcggtcagttgcttgtccaggtcattgcccaggctggcgccggtcatcagggtgattttcagcggcgacgtcttggcgcgttcggccagggcgtgggggacggccttggcttcaccggcacgggtgaagccactcatgccgacggtcatgccgtcctcgatcagtgcggcggcgtctgccgcgctcatgaccttgttcaacaacgaaggcaagcggatgcgatcacggtacatggattcttatctcaggctacggaagcaaggtgcgcagtttagtgatttcaaataatttcggcccgctaccatggtcgaatgccaggtagcgatttagagcctttggtcgggtttcatgcagcaataaaaaaccccagcctatcgcaggccggggtttcgagtattgcgctgaggcagtgttactcgacggctttgaccatgtcttcgataaccttcttggcatcaccgaagaccatcatggtcttgtccaggtagaacagttcgttatccagcccggcataaccactggccatcgagcgcttgttgacgatgatggtcttggctttgaacgcttcgaggatcggcatgccggcaatcggcgagttcgggtcgttcttggcggctgggttgaccacgtcgttcgcgcccagcaccagcaccacgtcggcctggccgaactcggagttgatgtcttccatctcgaacacctggtcgtagggcacttctgcctcggccagtaggacgttcatatggccgggcatacggccggccaccgggtggatcgcgtacttcacggtcacgccacgatgggtcagcttttctgtcagctctttcagcgcatgctgtgcgcgtgccactgccaagccgtagcctggcacgatgatcaccgtgtcggcgttggtcagcaggaaggtcgcgtcatcagccgagccggatttcaccgggcgtgcttctttagagcccgccgcagcacccgcatccggcgcattgccgaaaccgccgagcagcacattaaagaaggagcggttcatcgccttgcacatgatgtacgacaggattgcgccgctggagcccaccagcgagccggcgatgatcagcatcgagttgttcaacgagaaaccgatccccgctgcagcccagcctgagtagctgttaagcatcgacaccaccaccggcatgtcggcgccgccgatcgggatgatgatcagcacacccagcacgaaggctagggccagcatcagggcgaaggcggtgaggttgccggtgagcataaaggccaggccgagaccgagggtcagcaggccgagtaccaggttcagcttgtgctgcccgccgaactgtaccggtgcgccctggaacaggcggaacttgtacttgcccgacagcttgccgaacgcaatcaccgaaccggagaaggtgatggcaccgatggctgcgccaaggaacagttccaggcggttaccggcagggatcgaatcgcccaggtgtttgacgatgcccagggattgcggctcgactacggcggcaatggcgatgaacacggcagccaggccgatcatgctgtgcatgaaggcgaccagctccggcatcttggtcatttctacgcgcttggccatgaccgaaccggcagtgccgccgatcagcaggccgacgatcacgtagccaatgcctgcggtagccagctcagcaccgagcttatagatgaggcccacggtcgtgagcactgccagcgccatgccgagcatgccgaacaggttgccgcgtcgcgaggtggtcgggtgtgacaggcctttaagggcctggataaagcagatcgacgcgatcaagtagagcgtcgtaaccagattcatgctcattacttcggcgcctcttcttttgctttcggggctttcttcttgaacatctcaagcatgcggcgcgtcaccaggaagccaccgaacacgttgaccgctgcgagcgccaccgccagggtacccatggtcttgcccagtggggtcacggtgagcgcagcggcgagcatggcgccgacgatcacgatcgccgaaatcgcgttggtcaccgccatcaatggtgtgtgcagcgcgggcgttacgttccagaccacgtggtaaccgacataaatcgccagcacaaagatgatcaggttgtagataccgggggagataagctcttccatcgtctgaatccctgcttaggcgtttttgcggatgacttggccgtcgcggcacatcaggcacgcggcgacgatgtcgtcttcgaggttgatttcaaactgcccttctttagtgaagaccagcttcaggaagtccagcaggttgcgcgcatacaaggctgacgcatcggcggcgacagcaccggcgaggttggtcgggccgcagatgatcacgccattttccaccaccacctgatcggcgacggtcagcgggcagttgccgccttgtgccgcagcgaggtcgatcaccacggaacccggcttcatctgcgcgacggtttcagcgctgagcaatgtcggcgctttacggccaggaatcagcgcggtggtgatgacgatgtcggcctgcttggcgcgttcatgcacggccagggcctggcgttgcatccagctggagggcatcgggcgagcgtacccgccgacgccgacggcgcattcgcgctcttcgtcggtttcgtaaggcacgtcgacgaacttggcgccgagggattcgatctgctctttaacggccgggcgtacgtcggacgcttcgataacggcacccaggcgtttcgctgtggcaatcgcctgcaagccagcaacacctgcgccgaggatcaatacgcgggcagccttaacggtaccggcggcagtcatcagcatcggcatgaagcgcggatagtggtgagcggcgagcagtaccgccttatagccggcgatgttggcctgggacgacagcacgtcgaggctctgggcccgcgaggtacgtggcgcagcttccagcgcaaaggcagtgatgccctgctcggccagcttgccgatggtttcgttgctgaacggattgagcatgcccaccaacacggtgccgcttttgatcagcgtcagttcgctgtcgctgggggcgaccaccttgagaatcagctcggcgccaaacgcatcgttggcactgccaatggtcgcgcccgccgtttcataggcactgtcgacgatgctggctttgatgcctgctccgctttgtacagtgaccttatggccctggccgatcagcttcttgatggtttccggggtggcagccacccgcgtttcaccggtctgggtttcgagaggaacaccaatgtgcacgtcaaatctcctgcatgatctttttgcttttgatctttttgtaaaaaggccagtgcaccgcgagtggcacaactggggcggccgatcagcacgatcccgctgaaatgacagcggggcgcggcattttgcaggcgaactttacggccttcaagggattatgacgggtgacgaaaaattaactacaagtcaccctgtgactgattgtcgcaacatgccgaaataacctgttcaaatacatgggcttaaagggccgcaggcgtttttgcaatcttttgtcatggttggtgtgaatagtcggctattggctcgtaatagtcgttcaaagccatgtgaatcatggctttgagccgaatttttcctgaaaaatatagtctgcttaaatgcgacatatatatacatctgtaggactgtattattactgactacaaagtcaataatacggctttggcctttaaacattgatgctgtagcgatgtgactggtcaatgagccagtccctgaaagcgtgaagtgaggcagattcgacttttctgtcaggaatcatcaggtaataagccttcgtactgctcagcgcttcggggtttgcaatcaccaattggccctcgtccagttcgcgctggataaggaacggggggatcagtgcgatccccatgtcatgcatggctgcttgggacaacatcgagaatagctcgtaacgggggcctgtcatgtcgcgtgggatgttcaggtgttgggcgttgaaccattggcgccacgcgtagggtcgtgtggtttgctgcaggagcggcagttctgcaatctcctgggcgctgaactgcgcacggtcacccaacagccgagggctgcatacaggtacaggattttcgcccatcagccggtgggactcggtaccggaccagtcggcatcgccgaagtagatggcggcgtcgaattcggtgtcggcaaagaggaaagggcgtgttcgattcgtgaggttgaccgtgacctcagggtgttggcgttggaagtccttgaggcgaggtatcaaccattgagtgccaaaggtcgggactacggccagttcgatggtgttggcgccctgctgccccatgacggaaagcgtatcgcgctccaccgcatccagttgcgtcgccacgcgacggctataggacagccctgcttctgtcagttttaccccgcgccgtgaacggcgaaacagctcgacacttaaaaactcctcgagactagcgatctgtcgacagatggcgccttgagtgatcgaaagctcctgcgcagccttggtgaagctctcgtggcgggctgccgcttcaaagctcaccaacgcggtggtactgggaattttcctgcgcatataccgtgtcctcacttgccaaggcgcatatacgccatttttggctttttcgaagtgagaaattagcacaaccctatgcggaaacctcgtttgccctacgcgattgccgggcctaggctgcttccacgacttccgatttcttccgcgaggacttattcatggctggcaaggcaagcttcaactggatcgatccactgctgctggatcaacagctcaccgaagaagagcgcatggtgcgcgacagtgctgagcaatttgcccaggacaagttggcgccacgcgtgctcgaagctttccgccatgaaaagactgaccctgcgattttccgcgagatgggcgagaccggcctgctcggcgcgatgattcccgagcagtacggtggcagtggcttgaattacgtcagttatgggttgattgcgcgtgaggtggagcgtgtcgactcgggctatcgttcgatgatgagtgtgcagtcgtcactggtcatggtgccgatcaatgaattcggcaccgaggcgcagaagcagaagtacctgccgaagttggcctctggtgaatggatcggttgttttggtctgacagagcctaaccacggttccgaccctggcgcgatgatcactcgtgcccgcaaggtagagggtgggtacagcctgacgggcgcaaagatgtggatcaccaatagcccgatcgcggatgtatttgtggtgtggggcaaggacgatgctggcgacatccgtggttttgtcctggagaaaggctggaagggtctgagcgctccggcgattcacggtaaggtcgggctgcgcgcctccattactggtgaaatcgtcatggacaacgtgttcgtgccggaagagaacatcttcccggacgtgcgcggcttgaaggggcctttcacttgccttaactctgcacgctatggcatctcctggggcgcgttgggggcagccgagttctgctggcacaccgctcgccagtacacgcttgatcgccaacagttcggccgtccattggcggcgactcagttgatccagaagaagctggcagacatgcagaccgagatcaccctggctctgcagggctgtctgcgcctggggcgcatgaaggacgaaggtacggcggcggttgagatcacttccatcatgaagcgtaactcgtgcggcaaatccctggatatcgcacgcatggccagggacatgttgggcggcaatggtatttccgacgagttcggggtggcgcgtcatctggtcaacctcgaggtggtcaacacctatgagggtactcatgacgtgcacgccttgattctggggcgcgcgcagaccggtcttcaggcgttctattaataggagcacggcatgggcgcgctttcgcatctgcgggtgctggatttatcgcgagtactggcgggcccttggtccgggcagatccttgcggaccttggggctgaggtgatcaaggtcgagcggccgggcagcggcgatgatacgcgcgcctgggggccgcccttccttaaggatgcctatggtgagaacaccagtgaggcggcgtattacctgtcggccaatcgcaataaggagtcggtgacaatcgacttcacgcggcctgagggacaggcgctggtgcgtgagctggcggccaagtcggacatcctgatcgagaatttcaaggtgggtggtctcgcggcttacgggctggactatgaatccctcaaggagatcaacccggagctgatctactgctcgattacagggtttggacagaccggtccctatgcggcgcgtgctggttatgacttcatgattcagggcctgggcgggcttatgagtctgactggccgtccggagggagaagacggtgcagggccggtgaaggtgggggtggcactgactgacatcctcacggggctttactcgaccgtggcgatattggcggcactggctcatcgggatcatgatggaggcgggcagcatatcgatatggcattgctggatgtacaggtggcatgcctggccaaccaggcgatgaattacctgacgacgggtgtgccaccaaagcgtctgggtaacgcccatccgaatatcgtgccttaccaggactttcccacggccgatggcgacttcatcctgacggtgggtaatgacgggcagttccgcaagtttgctgaagtggctgggcagccacagtgggcagttgatccgcgcttctctactaataaggtgcgggtggccaatcgggcggagctgattcctctgatacgtcaggctacggtgttcaagacgacggcggagtgggtgtcgcagttggagcgggtgggtgtgccttgtgggccgatcaatgatctggcgcaggtgtttgccgatcctcaggtgaaggcgcgcgggctggcgatggcgctgcctcattcgttggcagggatggtgcctcaggttgccagtccgataaggttgtccaagacgccggtggagtaccgtagtgcgcctcctctgctgggagagcatacggccaaggtgcttcaggaagtattggggttgggggtggcgaatgtggtcgcattgaaggctgcgggcgtcatctgaatcctatcttctatatagagggcgttaacggcactttattggtggttttttaatcaatgctaactaattgatagaaaagcaaaattaagggttgacggcagattctggaagtctataattcgccccacttccggcgcagtcgaaacggaaaactccttggtaaacaaagagttacgcagaattcgacagcgacttgcttcagttcatcgaagcccagaaggagttggtagagcagtgttgtctggctctattaacgtttcgatcctctcggtcgaaagcggagaaaaagaggtgttgacagcagcgtgtaacgctgtagaattcgcctcccgctaacgagagatcggaagcgcaagtggttgaagttgttgaagaaatcttcgaaaacttctgaaaataatcacttgacagcaaatgaggctgctgtagaatgcgcgcctcggttgagacgaaagatcttaaccaaccgctctttaacaactgaatcaagcaattcgtgtgggtgcttgtggagtcagactgatagtcaacaagattatcagcatcacaagttactccgcgagaaatcaaagatgtaaccaacgattgctgagccaagtttagggtttcttaaaaacccaaagatgtttgaactgaagagtttgatcatggctcagattgaacgctggcggcaggc

SEQ ID NO: 126 - DNA, 62859 bp, Pseudomonas nodulensis; identical to SEQ ID NO: 19

SEQ ID NO: 127 - DNA, 333954 bp, Pseudomonas nodulensis
  misc_feature (25807)..(25848): n is a, c, g, or t
  misc_feature (201635)..(201701): n is a, c, g, or t
  misc_feature (245665)..(245751): n is a, c, g, or t
ggcgcgactctcatcgtggcgctggggcaagccccaaacagacgccggatagatttaagcaagccaaccacaccacccgttaatcagtattgcaaaaatgggggtgaccatagatttttatgcccattgccgcacattcagcccgtgttcattgtacgtaggcggctccattgactaaggttgcaagcattgccgatggagcgtgctggatgactgctgttgatttacccgctgtaccccgcgtgttgattgccgaggcggacccttggtcgcgggacctgctcaagcaagtgttgttgaatgtgcgctgcgatgcgcggctggatgtgtgtgcggacggccagcaagcggcgaccctgctgcgggataaggcctacgacctgatcctggccgattgggagctgccgggcatcgatggcctgagcctgctgcgcagcgtgcgccagaagcgtcgctcgcctttgctgccgttcattctgctgagcagtcgcaatgacagcgccagcgtgcgcgaagccttgcccctggcgcccacggcgtacctgaccaaacccctgaacatggaaggcctgacccagcgcctgcaggacctgctgctcaacgaaggcgaaacggtgtactgcgagatcccaccgttggcgcccggcatgaccttgccagtgttccttgagcgacgccgcgaagcgtccgacggcgcgccattgcgggtcgatgtgaaagccgccgtgcaacacagcctcgggccggaaggcctggacctcaagcatctggaagaccaggtgcgcatggacccgcaaatcaccgccgtgctcatcgccgccgccaacagtgccggccatcacggcgcaccggtgcagaccctgcccggcgccctgcacaagctggtgccggggcaaagcatgaacctgatcctgggcctggcgctcaagcacaacgtggtactcggggacccggcgctggtcgcctatgccgagcggcactggcaagtgtcccaggacactgccgactacgcccggcgcctggcccgcatgcttgagctggatcacgaacgctgctacagcgcggggatcctccatcggctgggcgacctggcgctgttgcgctgcctggaggactggcgccagggtggcggtgaactggatgacgaagcgattggcgagtccctctacacctttggcgctgcctatggctcggcactgcgtgcgcgttggcgcttgccgttggagctgcgccagttgattgcggcgatttactcgttggagggcggtgtgtatgcgcgggatgcgctggtggtgaatctggcggcgcagatggcgcgtttgactgagcatgaaggcctggaagaactggcggcgggcaagacggcgcgattgctcaaggtgggcttgtcggagctgacccgagtgcgcaaatcctaatgtgggagggggcttgctcccacctttgagcagtgttgactactagcccgcgatcacgcggttcttgcccaggcgcttggcctcgtacatggccgcatcggcacgggcgaacaggctgtccagggtcgagtcgtgctcggtgaggctggccaggccctggctgatggtcacgctgaaggcctggccttcgtagctgaagctgagttcctggatctcccggcccaggcgctcggccacctgcagtgccatctccggcgcacagccgggtagtaccgcagcgaactcttcgccaccgatgcgcccgaacagatcgccacggcgcagcacccctcgaccgctctcggcgatacgccgcagcacctggtcgccctccaggtggccgtagctgtcgttgatgtccttgaagtcatcgatgtccagcagcagaaaggccagcggcgcaccttgggcacaggcactgtcgaaggcctggttggcgcattcgaagaagtgccggcggttgctgctctgggtcagcacgtcggtggtggcgagacggtgcagctccagttccagctgtttcttttcggtgatgtcttcggccatgcccactacgatcagcggctcaccgggctcgacctgctggttcatgtagcacttgtcactcagccagcggatctgcccgtcggcagtgatgatgcggtactcgcggtcttccacggcgccctgttccagcacacgagccaggctgtgttcggcgtagtcgaggtcttcggggtggatgctgttgcgccattcccggtggtcggccagcagcagaccggcagagcgcccgaagacgcgttcgtaggccgggctcacgtacagcacgcggcgggtttcccaatcgatggcccacagcacggcattcacgctgaccagcattgagctcagcagttgctcacgttcgctcagtcgctcgacttcgccctgggcatgcaccagcgccagcagggtcgccgccgctgctgggcggggatgctcagctgctggcgcgtcgattaaggaggacttttcgtgaaccatcggcacaactctctctgggcgcgccgcaaacaggagcagcggtcactacaaggggccaccatgatggcgaagtgttcattgagagaggcgaatttcagtgaagttccgtcaacaggaccgattgccggtgcccggtaaatgacgccaaaaagctgataggtgggagggcaagccctcccaccgcagcatcagaccgccgcaggacgcagcgaataagtcttcaattggtgcgcaaaatcccgcagggactggatgccgctggcctcggcctcatgcacccattccttgatggccgccagcatatcgtggccattggagctggtcttgagccagatctgctgcagcgccaggcgcttttcgtagatcactttcagtgcatggctgtgttccagcaggctctggatgcgcacgtgatggcggtcatccagcaagctggtttcccgcgacagcaggcgcttggcgcggtggaactgatggcgcaccgagtgatcgaccttttccagctcctgcttgaccagcgggccgatcaccaacttgcggtattgggccatgatctggaagcggttgttgaggatggccatggcggtatccatgtccaggtggcccttgccttccacgcggtgggcaataggggcgacacgctgcaccttggccaggcgcaggaagctgaacaccttgatccacgcccagcccaggtcgaactcccattttttcaccgacagcttggcggagttggggtaggtatggtggttgttatgcagctcctcgccgccgacgatgatgccccacggcaccaggttggtcgccgcgtcacggcattcgaagttgcgatagcccacggcatgccccaggccgttgatcacgccggcggcccagaacgggatccacatcatctggatcgcccagatggtaatgccgatggtgccgaacagcagcaggtcgatcacacccatgatcgccacgcccagcagtgggtagggggtgtagattttgcgttcgatccagtcgtccgggcagttcttgccgtagatacgcagggtttcggggttttcggcttcggcgcggtacagctcggcgcctttgcgcagcacagtggacagccccttgatgaccgggctgtgcgggtcatcgacggtttcgcacttggcgtggtgcttgcggtggatggcagtccactcgcgggtgttctgcgccgtggtcagccacagccagaagcggaagaagtgtttcaggccggcattgagctccagggagcgatgggctgaataacggtgcagatagaccgtgaccccaacaatggtcacgtgggtcatcaacagcgtgactgccaccagttgccaggctgataggtcaagaaaaccgttgtaccacataggctgtatggccctcagataaagaaaagaacagctcaagcattatcactaagcctacagagaaaaccagcgaccctttcagataagacttacgagatgttacttattctataatccgcagcgtttatagggcgattatgtttttttggtaaggattactgaccatatgctgtattcataccgtggtgccctacgcgcggggctggtatacctgctggtttctgtcgcatggctccagctcagcaaccacttattgatcagctttctcgatgaaccgcgggagttgggacgctggctgcaagtgcggggctatgtgtgggtggccctcagcgccctggcgatttacctgatgtgcgcccgatttgcgcgtgccaaccagttgcagcaaccgttgaaggaaaaccgcgaacgcctgcgccaggccgccgccgtgtttgattgcacccgtgaaggcgtgctggtcaccgacgcgcaagggctgatcgtgcacgtgaaccgcgccttcatggcgatcaccggctacagccgcgaagacgtcatgggccagcagcccagcttgttcaagtccgggcgccattcgtcgcatttctaccagcagatgttccagagcctggagcgtaccggcgaatggagcggtgaaatctggaaccgacgcaaaagcggcgagatttacccccagtggcaaaccattcgcgtgattcacgatgaccagggccacgtcagccattacgtcgcggtgttttccgatatcagcgccatcaaggactccgagcacgaactggcccacctcgcccatcacgacccgctgaccgacctgcccaaccgcctgctgttcaccgaccgtgccgaacaggcgctggcctcggcgcagattcacaagcgtggttgcgccttgctgttgctggacctggaccacttcaaaatcatcaatgacagcctgggccataacgttggcgaccagttgctcaaagtcgtcggcgaacggctcaaggcgttgttcggcccgggcgtgaccctggcgcgcctgggtggggatgagttcgccgtgctggcagaaagttgtccacaggtggcccaggctgcgggcctggcgcaacgcatactggaggcgctgaaacagccatttatctttgacggccaccagctgtttatcagcgcgagtattggcatcagcctgttccccagcgacgccttgagcgccgagcagttactgcgcaacgccgattccgcgttgttcaaagccaagagtgctggccgcgaaggttatgccctgtacaccgaagaactgaccgcccatgcgcagaaccgtgtagagatcgccagtgagttgcgccgtgcgcttgaacagcaggagctgtgcgtctactaccagccggtgcacgacctgaacggcagccgcctgatcggcgtcgaagcactggtgcgctggcagcacccggagcgcggtctggtgccgccgggcgagttcatcccgattgccgagcgcaccggcctgattgccgatatcgacgcctgggtcatggaccgggcctgccggcaaatgtgcgactggctggggaatggggcgccactgagttttatcgccatcaacgtgtccagccgcctgtttgcccggcgcgagctctacgaacaggtcgcccaggtgctgcacgacacgggcctggatccggctttcctggagttggaagtcaccgaaagcgcggtgatggacgacccggaagtagccctggaacaactgcaccgcctgcgcgaactgggcctacgcctggccatcgacgacttcggcaccggttattcctcgctgttgcgcctcaagcgcctgccggtgcagaagctcaagatcgatcagggcttcgtcgccgggttgccgtgggacgaggacgatgcagcgatcgtgcgcgtggtgatcgccctggcaaaaagcatgggcatgcaggtgcatgccgaggggatcgagcaggtggaacaggcgcggttcctgttggatcagcagtgcgatatggggcaggggtattggtttggccggccgatgccggcgggcgaactagattggtccaaggcacccgcgatccgaacctgaaatgctttcaaatgtgggagtgggcttgcccccgatagaggtgcatcagcccctcattagttgactgacactccctcatcgggggcaagccccctcccacatttgaaagcgatctgcgcgcaaccccgcgtcccaccagaaaattctttctggttatataaacattcttaaatagtatttttaagaatatccgcgcttatctactatcgccctcacgccgcaagcagtgccgccactgcgaggcactattcatttcaggagcgagaccatgagcgcatctctacgtagcgtcgacggccaggacgaagcagccattttgcgtgagatccagagcgccctgcgcgatctgcggtttggcgcggtggaaatcacggtgcacaacgcccaagtggtccagatcgaacgcaaagaaaaattccgcctgcagaacccgggtaacaaaccgagctgagcaagaacggcgatagacccgcaactataaaaaaagccaacaccccaagaatttcaggagcttctatgtcgtcgattcgccgttacgccctggccgccctggccagcgccgtgtttgcaggttccgcggttgccaaggactacgagttgctcaacgtctcgtacgaccctacccgtgagctgtaccaggactacaacgctgagttcaccaacttctggaaacagtcccacccaggcgacaacgtcaagatccagcaatcccacggcggttcgggcaagcaaggccgtgccgtgatcgacggcctgcgcgccgacgtggtcactctggccctggccggtgacatcgacgaaatcgccaagctgggcaagaccctcccggaaaactggcagacccgcctgccggacgccagcaccccatacacctcgaccatcgtgttcctggtgcgcaaaggcaaccctaaaggcatcaaggattggggcgacctgatcaagaaagacgtgtccgtgatcaccccgaacccgaaaacctccggcggcgcccgttggaacttcctcgccgcctgggcctatggcctcaaggccggtggcagcgaagccaaggcccaggaatacgtgaaggagctgttcaagcacgtaccggtgctggacaccggcgctcgcggctcgaccattaccttcgtcaacaacggtcagggtgacgtgttgctggcctgggaaaacgaggcgttcctggcgctcaaagaagacggtggcgccgacaagttcgacatcgtcgtgccgtccctgtcgatcctcgccgagccgccggtggccgtggtcgacaaaaacgccgagaaaaagggcaacaccgaaatcgccactgaatacctgaagcacctgtacagcccggctggccaggagattgcggcgaagaacttctaccgcccacgcgatgcaaaagtggctgccaaatacgcccagcagttcccgaaactggacctggtgactatcgacaaagacttcggcggctggaaaactgcccaaccgaaattctttaacgacggtggcgtgttcgaccagatttacaccgcgcagtaagccgagcaacaacccgcccacagagcccgcattcacctgcgggttttgtgtgtcagttcccttaaccaaggactcttatgtcgcgtcgtatctcccccgtcatacccggcttcgggctgacgctgggctacaccgtggtgtacctcagcctgatcgtactcatcccgctggcggcgatgtttgtacacgccgctcaactcacctgggatcagttctggaacatcatctccgcaccgcgtgtgctggcggcgttgcaactgagcttcagcaccgcactgtacgccgcgctgatcaatggcgtgatcggcacgctgctggcttgggtgctggtgcgctacaccttccccggtcgcaaggtcatcgatgcgatgatcgacttgccgttcgccttgcccaccgctgtcgccggcatcgcactgaccgcgctgtacacgcctaacgggctggtcggccagttcgccgccgacctgggcttcaagatcgcctacaccccgttgggcatcaccctggcgctgaccttcgtcaccctgccgttcgtggtgcgcacggtgcagccggtgttggccgatatcccccgggaagtcgaagaagccgccgcgtgcctgggtgccaagccgttgcaggtgttccgccacatcctggtgccggcgctgctgcccgcctggttgaccggttttgcgctggcgtttgcccgtggcgtcggtgagtacggttcggtgattttcatcgccggcaacatgccgatgaaaaccgagatcctgccgctgctgatcatggtcaagctcgatcaatacgactaccgcggcgccacgtccattggcgtgttgatgctggtggtttcctttgtcctgctgctgctgatcaacttgttgcagcggcgcatcgaacgtccataaggaggcgcggaacatgtcccaatcgtctatttccgccgcgtcctcggccaacgctgcccgccgtggcagcgccgcgtcgcgacgcatcctgatcggccttggctggctggtgttcgccctgttcctgttgttgccgctgtttatcgtggtgacccagggcctgaagaacggcctcggcgcgttcttcaccgcgatcctcgaacccgacgcgctgtcggcgttgaaactcacggtgatcgccgtggtgatctcggtgccgctcaacctggtgttcggcgtcagcgccgcgtggtgcgtgagcaagtactcgttccgtggcaagagcatcctggtgacgctgatcgacctgccgttctcggtatcgccggtgatcgccggcctggtctatgtgttgatgttcggcgcccagggcttctttggcccgtggttgcaggaccacgacatccagatcgtgttcgccttgcccggcatcgtgctggcgaccatcttcgtcaccgtgcctttcgtggcccgtgaactgatcccgctgatgcaggagcagggcacccaggaagaagaggccgcgcgcctgctcggtgccaatggctggcagatgttctggcatgtgaccgtgccgaatatcaaatggggcctgatctacggcgtggtgctgtgtaccgcacgggccatgggtgagttcggcgcggtgtcggtggtgtccggccacattcgcggcgtgaccaacaccctgccgctgcacgtcgagattctctacaacgaatacaaccacgttgccgcgtttgcggtggcgagtctgttgctgatcctggcgctcttcatcctgctgctcaagcagtggagcgagaaccgtattaaccgcctgcgcgccggtgcggctgaggaataagtcatgtcgatcgaagtccgtaatgtcagcaagaacttcaacgccttcaaggccctgaacagcatcaacctggacatccagagtggcgagttggtggccttgcttggcccgtccggctgtggcaagaccaccttgctgcgcatcattgcaggcctggaaaccccggatgacggcagcatcgtgttccacggtgaagacgtctccggccacgacgtgcgcgatcgcaacgtcggttttgtgttccagcactatgcgttgttccgtcacatgaccgtgttcgacaacgtggcgttcggcctgcgcatgaaaccgaagaaccagcgcccgagcgaaagccagatcgtggtcaaggtccatgagctgttgaacatggtgcaactggattggttgtcggatcgctacccggagcagctttccggtggccagcgccaacgtatcgccctggcccgcgccctggcggtcgagccgaaagtgttgctgctggatgagcccttcggcgccctcgacgccaaggtgcgtaaagaactgcgccgctggctggcacgcctgcacgaagacatcaacctgacctcggtgttcgtgacccacgaccaggaagaggccatggaagtcgccgaccgcatcgtggtgatgaacaagggcgtgatcgagcagatcggctcaccgggcgacgtctacgaaaacccggccagcgatttcgtctatcacttcctcggtgattcgaaccgcctgcacttgggtgaagacaagcacgtgctgttccgtccacacgaagtgtcgctgtcgcggcatgagctggaagaccaccacgccgctgaagtgcgggatatccgcccgctcggcgctaccacccgtgtgaccttgaaagtggaaggccagagcgagctgatcgaagccgaagtggtgaaagaccacgacagcctgaccggcctggcacgcggcgagaccctgttcttcaagcccaaggtctggcagaaagcctgataaccccgcactacccaatgtgaaaatggggccaatgtgggagggggcttgccccctcccacatttaggcctctctcggcttcagatcgcgtcgaaccaccggtcccgagcgctcctctatctgttgcttcaaaccctgccgcaaccccagcagaaacgccaactccgccaccacaaacaacggcccgacgatcagccccgacacatcatcgacaaacgcaggcttcctgccttcgtagtaatgcccgacaaactgaatcacccaacccaccacgaacaggccgatgccgctgctgagccacaccagcgtgctctgcgccgccagcacgtgtccggcccacaccgacagcgccatcagcacggtcatcaacacgcccagggccaattccaggcgcaggtaaaaccacgcagagaacagcgcgagaagaacggcgggtgagatccatatgccagcgacggcccattccgggcgtgacaacaacaccgcaaccgccaccacgatcagcgggatgccaacaaagtggctggcgatattgcgcggatcgcggtggtaggcagcgtattgactcaggtgatcgacgaggcttttcattgttattcctcctgtaggatgtttgatcatgccccgtcagcctgtggcgaactgtcagctgggcgacaatcttcggagttcacatggacgcagaacaatggcgcgcccggttggccagcggtcactggttcagccacctggcggcgccttttcagcatagtctgctggcccatgcccggctgcggcagctgacggcggggcaatacctgttcaagcgcggcgacccgccctgtggcttgtatgcggtgctcgacggcaccctgcgggtcagcgcggtgaacgagcagggcaaggaggcgatactcagcctggtggaggcacctttctggttcggcgaaatctgcctgttcgatggcctgccgcgcacccacgacgcctgcgcggtaggtcccagcacactgttgcaggtgccgcagcaggcgctgctgggcatcctggacgagaccccgcgatactggcgcgacctggccctgctgatgagccagaagctgcgcctgagtttcatcggcctcgagcagctcagcctgatgccggccccggtgcggctggcccaccgcttgttgatgatcgtcgagggctacggcgacaacgaacatgctaaacgcgtgctgcaattgccccaggaagacctggcggccatgttgaacctgtcgcgccagaccaccaacgctttgctcaaggacctgcaagccgccggcgtcgtgcgcctgggctacggcgagatcgaaatcctcgacgtacagcggctacggcaggcggcgcacccctgagggtgttagcctgcacgcctatcaatcgaggtgtgttatgcgcgtgctgttagtggaacatgaatccgacgaggcacagcggatggccgtgggcctgaacgaggccggctacaccgtggaggtggcggccaatggcatggcggcgttgcgcttggttgaaagcaccgagtacgacctggtgatcctggatgtgatgctgccggggctcaatgcctggaagttgcagcaggcgattcggcagaagggccagacgccgatgttgttcctgaccacgcccggcgggattgaagaccgcctgcgcgggttggaattgcatgaggatgactatttgctcaagccatttgcggccaagacgctggtggcgcgagtgaagaagctgctgcggcgggggcggtgactattctgatgctatcgggggcaagccccctcccacatttttgaacgtattcacagatcaacagtgggagggggcttgcccccgatgaggccctcccagccactacaaatccctacctcagcccatcccgaaactgccccggcgtcattcccgtccagcgcttgaacgcccggttgaagctgctggtatcggcaaagccgagcaaatgactgatctcggccaatgagcactgtgggtcgcgcaagtgcagcaaggccaggttctcgcggcactcattgagcagcgcatcaaaccggcagccttcatccgccaggtgacgctgcaagctgcgcaggctcaggtgcagcgcctgggcgacgcgttcggcacttggctcgccgtcgggcaattgcgcttcgatcacccgacgcaccttgcgctcccaggtcagtggctgcaattgagcgagggtgcgcttgagcacggtttcgttgtgctcggccaactcagggttggcgtcgtccaggtggctgtcgaaatcgatggcggcaaactccaggcggtcttcttcggcgccgaaaaataccggcgcacgaaacaccgtgtgccacggcttggggtctgcgggctcgggtcttcgcaggtacaccgccagcggcgcgtattcacgccccaggcgattgcggcaggtgcgcacgtagattgctgcaaacgcatcgatggcttcgaaagccggcgccgggttgccgggcagttgcaacaggcgaaaccgatagcgctcgccatcgccgctcagctccagggtcagcgcatcgctgaccacctggtggtagcgcacgatgcgctcgaacacttcccgcaggctgccgctggccaccagcgcatagcccagcgcgtgaaaggtggtggggctgacgaaccgcgacacccgcaaaccaatcgccgggtcgccgctggcctgcaccgccagcgcccacaaacgcgtggtcgccgacagcggatagcgcgcgttgggatcgtccatcagctgcgggtcgagcccggcttgcaggcacaacgcggcgctgtctaggcccagggcgtcgagttgcttgcgcagggcgcgggtccagctggcgagggaggtgggctcggtcatggcgattggcgcttgcggtcaacaggttggcgtgtgtggccgatgccctggcggaccgcttgggccaggatgcatccatcaatacaccagaggatggaagcatggacggtacttctgcaagtccccagcagatgaacgcacaacagcgctcggcgcatatccgtgacgtggtgctggccgagggcgtgcgcctgcgccagcagcatccctggctgctgcatcaggacgcgttgggcgcgggcatcctggcgtttgcgttgctgggcatgctcgggtcggcggcgctctacatcactggtcatatggcttggtgggtctgcctgctgcttaacgcgttcctggcttcactgacccacgagctggaacacgacctgatccacagcatgtactttcgcaagcagcgcgtgccccacaacctgatgatgggcctggtatggctggcgcggcccagcaccatcaacccgtgggtacgccggcatctgcacctcaaccatcacaaggtctccggcaccgaaaccgacatggaagagcgcgccattaccaacggcgagccctggggctttgcgcgcttgctgatggtgggcgataacgtcatgtcggccttcatccgcatcctgcgggccaagacctggacgcacaaactgacgatcctcaagcgctcgctgctggtgtacgcgccactggcgctgctgcattggggcgcgtggtatgtgttcctcggctttcatgccgccaatggcatcgccggcctgctgggtgcgccgatcgactggtcggccggcaccttgcagatgatgcaggtgatcgatatcgccgccgtggtgatcatcggccctaacgtgctgcgcaccttttgcctgcacttcgtcagctccaacatgcactactacggtgatgtggagctgggcaacgtgatccagcagacccaggtcttgaacccctggtggctgtggccgttgcaggcgttctgcttcaacttcggcagcacccatggcatccaccactttgtggtgaaggagccgttctacatccgccagatgaccgccaaggtggcgcacaaggtcatggcgcagatgggcgtgcgcttcaatgatttcgggacgtttgcacgggccaatcggttgggttttccagcgcctgcagggtttcgatcaacgccttcgccgcaggcgacaagcgcaccccagcgcggctgatcaccccgcagcggttgctcaggctgtccagggcgtgcggcaggttgcgccagtgcagtgcgtgcagctcgcccttgatgaactcctcgacaaacgcctcttcggcgcccaggccaatggcatcggactggcgcacgatggtggtcagtgcggcaagctgctccagctcgatggcgggcgcgaagtcgacgcgcccgctgagattggccagcagttttcggatgcccggcgcgatcagcggtgtggccagcgggtagccgaacaggtcgttggtggacaggctgtccttggccagcagcgggtgccctgcacggcagaaaaacacgctgcgccgaggtgtcagggccagggtctggaagttcgggtccgcctcgaagtgacgcacatcggcgataaagaattcgatctcttcacggctcaggctgcgcccgagtttttcccagttgtccacctgcaacacggtgcgcactctggggtaaaccgtgatgaaccgcgccatggcctggggcgccaggttcaccgcggccacggcgtcgctgccgaagcgcacttcgccggcgtcgagtttggtcatgcgcgtgacttcatggctcaacagcgccgcgccttgcaccaggctcaacgcgtgttgcagcaccacttggccttcgggagtggggcgcaggtctttatgggcgcggtccaccaacacgcagccgaactcttgctccaggccctggatgctgcggctgaaggcgggctgggtgatgcccatggcgtccgccgcacgcacaaaactacggtgctcgttcagcgcgatgaaatagcgcagttggcgaaggtccatggtgtgcccggcatcctgtaggagagccaggattttaagggcactacttattccgtcaacgaagcatttttgttttatctagatcttaaatgcatatctatagagcaggtgccgtgcggtacgtcgccgggctgaacacccgcgtcaccagcagcatggccacggctgtcaccgtcaacaccacccacgcgctgacaaagctgccggtgagttcacgcagccagccggtcatccatggcgaaatcgcattgatcaaaaagcccacgccctgcacgaacgccgccagttgcccggcctggcgcgggtcgcggtggtggtcgagggtcagcaacaggctcagggcaaaacatgctcccaggccaaagccgcacagcgccacccacaggtggggaaattccagcggcgccagcaacaggccgaggtagccgagggtctgggccagcaggctgatccacagcaatggccgacggtcgaccccgcgttgcgccagcaccggcatcaacagcgcggcgatcacctggaagatggtcatgaacgccagcagcgaaccgctgggcaacacgccccagcccagttgctggtagtaggccggcaaccacgccaccaggctcatgtagccgcagttcaccaggccgaaatacagcgccagcagccaggcacgccgattgcgcaggcccttgaaggcaggcggcacctgtgggtttttcgctgcgcccagcggcaaccaggcccacagcaataacgccgccagcgcgggtaacaaccacacacccaacccggcttcccagtgctggaaatacgtggcggccaccgggctgagcagcgccgccagaccgcctcccgccatcaacgaagccgagtaaacgcccatcgccacaggcacgcggtgatggaattcgcgcttgatcatcgccggcaccaacgcctggatcagtgccacaccggcgccgccgagcaaggccgtgaccagcagcgtcgagccctggcccatcagccagcgcgccaggcacgccagcaggatcatcagcaggcccagggcgatgccgcgtcgctcacccagttgcgcttcaacacgcacgcccaccagcgccaccaagcccatgcacaccacgggcaggctggtgagcagggcgctgctctggaagctgaggccggtgaccaggcggatctcgccgagcaacgggctgatggaactgaggatcggccgcaggttcagtcccaggaccaccagcaggccccagccagcgaaccgacctgcggttgaagagttgagcgacatgcagaacctatggcgtgtgcaaaggaggcgtgaagtatcgccagtcgccgaggtattctgaaattaaatataaccatgccaatcagtggcaaatggaatggtgagcgtcatgttcgatcctgtgttgttgcgcagctttgtcgccgtggtggactgcggcaatttcacccgtgccgccgagcgcctgcacttgacccagtccaccgtcagccagcagatccgccgcctggaagacgcggtggcgtgtcagctgctcgaccgcgaccaacgccgcgtggtggcgacggcggaaggcgagcgcctgctggcctatgcgcggcgcatcctcgcgttgcatgaggaagccgccgatgtcttgatcaaccagcaaagcgacggcgtgctgcgcctcggtgtgccggaagacttcgctgccgaacgcctgatgccgctgttatcggcttttgtgctggcgtatcccagggtgcgcctggaagtcaccagcggtctcggtcccgagttgcagcgccagtaccgcagcggtgagttcgacgtattgctggtcaagcaaatgggcgacagcgatgactgcctggcctcatggccggagccgttgtgctgggtggacagccgcagtacgccctccctggggcgcgacccgttgccgttggtggcctttccggtaggcggcctgtaccgcaatgaaatgctgcaacacctggaagtgggcggctggcgctggcgcatcggttattccagcgcgagcctggcgagtgtgtgttcggcggtggcggcggggttgggtatcagtctgttgccccggcgtgtggtgcaggccgggcatgtcgtattgggtgcggacagcgggttgcctgcggtgcagggcgtgcggctggcgttgtatgggcgcactggcctgggcgccgcggggcagagcctgcagcgccaattgctggatttgtgcgcaaacagcccggtctgaaccatgcctttgccgaatattttttatgcctggaaagcatgcaaaaacatcgcctggaggccagcccgtgcaggacggggctttggcgtttcagcatggtttgtttattcgttctagatctatgtataacctcaaagattactttaagagataagcatctggcccggatgattcgctcctcgacggccttcgatgcaggcctgtcggttttttgttttaaaaccgtaggagtgaatcaatgggcaatgtccagaccgccgccagtgcacacgaggcgccgtggcgccaggcaccgggtggtgagttggtcgaccttggccggccgcaccgcacgccgttggggcaattgcgcacgcagaaaacgccaaagcgtttctccagccgtcgtgaaggcatcctgctcggtctgctggtgctggtcctgcacggtgcggtgatctactgggtgagccagaagccgaccccggtgctgccgattgtgccgccagaaattccgccgatgaccatcgaattttcccagccggcgccgccggtgatggaaccgccaccgcctgtgccaacaccaccgccgcccgtggtcgagccaccgccgccggtggtggatgagttggccgccaagccggcgccgcccaaaccgattccaaaacccaagccgaagccagtgccaaagcctgagcccaagcccgcaccgaaaccggtcgagcaaccgcctgcgccaccgacacccgcgccgcctgcgcctcccgctccaccggcgccggccccggtaacgccggcttcggccaacgccgcgtacctgaagaacccggcgccggagtacccgtcactggctcagcggcgcggttgggaaggcacggtgttgttgcgggtgcatgtactggccagcggcaagccgggcgagattcagatccagaagagcagcgggcgccagcaactcgatgacgccgcactgaccgccgtgaagcgttggagcttcgtgccggccaagcagggcgatgtggcccaggacggctgggtcagcgtcccgatcgatttcaagattcactaactattcggctgcggtgtgttgcacacgccgcgacctgcacagagggaagacatcatggcattagcatctccacttgaatccatcgaaagcgcggtgatctggctgctggtggttttttcggtcgccacctggggcctggccctgctcaagggcgtgcagttcggtcgcctcaaggcgcaggatcgcaagttccataaacagttctgggcagcgtcgagcctcgactctgccgatgaactggcgcaaacccagccgggcgccgctgcccgcgtcgcccaggccggttatgccgcgatccaggtgggcgaaacttcgcacgctgctgacctgagccaggcgatcaaccaccaggaccgccttgaacgcgccctgcgccaacagattgtgcgtgagcgccgctccctggaaaccggcctggcggtggtcgccagtatcggcagcacctcgccgttcatcggcctgttcggcaccgtctggggcatcatggaagcgctcaagggcatcagcgccgccggttccgccagcctcgaaaccgtggccgggccgatcggtgcagccttggtggcgaccggtgtgggtatcgccgtcgcggtgccggcggtgctggtctacaactatttcctgcgtcgcctcaagctgacggctgccgaccttgacgactttgcccacgacttctacagcctggcgcagaagaatgccttccgcgtattgctgcacccaaccctaaacaaagccggcgccggcactccgcaaaaagtgaaggaggcctcctgacatggccttctccacgcaagacagcgatgaagtgctgagcgagatcaacgtcacgccgctggtggacgtgatgctggtactgctggtggtgtttatcgtcaccgcgccgctgttgaccaacgcgattccgatcaacctgcccaagaccgaggccgtggccccggtggagcagaaggacccgctggtggtgagcatcgacggcgccggcaaactgtttatcaacaaggacgaaatccagccggacctgctggagttcaacctgcaggcggccaaggccaaggaccctgatgtgcgggtgcaactgcaggcggatgatggcgtgaattacggcgaagtggcgcgagccatggcgtctatcgagcgcgcggggattaccaagctgtcggtgattaccgcacgttagttgcaaaagcctcgacaagtttttggccgtctccttggcagggtgcggcctttttttttgcctgcgattcaatcctcaagttgaaatgcgatcaaggtgggagggggcttgcccccgattgcagtgtgtcagccaatcaatctgtaactgatacaccgccatcgggggcaagccccctcccacattttgaacttcattagttttgagtttttggttattaataaatagcttcttattccttaacgaatataaaccccatccctatactgttcagcaacgttaaacgctgcaggagggcacacccatgcacagcgagtcgattcgttacctgatcgtgccgggctggcaaggatcgccagaagatcattggcaaagtcactggcagaacagcctgcccaacagcgctcgcgtggagcaggccgactggttcaccccgcgtcgcgaagactgggttgctgcgctggccgaggccatcgcggccgacagcacgccggtgatcctgatcgcccacagcctgggttgcatcacggtggcgcattgggcggccaccgcaccggtgcagttcctgcgccaggtacgcggtgccttgctggtggccccggccgatgtcgaacggcctgcctgctctcctgcgttgcgtaattttgcgccgatcccgaccgacctgttgccgttccccagccaggtggtcagctccgacaacgacagtgccgtcagcgccccgcgagccctggagctggcccgcaactggggcgccgaagccggcattctgtcgggggcggggcatatcaatgtgaagtccggccaccagcgctgggagcagggctttgcttacctctatcgcctgcaaagccgccttgagcatcacgcccggcgcagtgcctgattttttcaacgccccgtcccttgagtggattgggggcgggagcctgccatgagtctgcatgaaacctacggccagccattgctgacctttcccgacgcggaaaaaagcccgctgagtatccgcgccaaggcgttggtgtttgtcgacccgcgttcgcggcaactgcgcgaagacctcgaaagcctcgcaccgcgtgccttgcccgtgctgatccgtggcgagaccggcagcggcaaagaattgctggcgcggcatattcaccggggcagcgaccgcaccggtttgtttgtctcggtcaattgcggcgcgatcagcccgacctatgccgatgccgaattgttcggttatgccgccggcagccacagtggttcggccagcagccgggccggctggtttggctcggcgaatggcggcaccttgtacctggacgagatcggcgacctgccgctgccgatccaggtcaaactgctggccgccctggaaaaccacgaagtcacccgcgtcggtgcccatcagccgagcccggtggatgtgcgcctggtggccgccaccagcatcgacttggcccaggccgtggccgccggtaagttccatgagcgcctgtttcactacctgagcgaaggccggttggagttgccggcgctgcgcgagcgggtcggtgacatcctgtccctggccgaatacttcctgggcatctacagtcagcgcctggacctgccggtgccgctgatcagcgatgccgcgcagcgtgtgctggaacaccacagctggccgggcaatacccgcgagctggaaaacgttatccactttgccttgctggtcagcagcggcgacgagattttgcccgaacatttgaatctgccggtggcgggttctgcgctggaacaggtgcagcggattttcgagcgcgccagccctgccgagcgggaaacgttgagcaaattcctgcatgaacaaaatggaatatcaacgtgaataaaagatattgttcgggaataaaaaaactaggtattgtccctcccacgccgcgatagcacttcgctggcacactacataaaaaacggtcgtcagagacgccccggaatttcgataaggacactgcatgaaaaaggttctgttgtttaccgcactggcggctgccctgactgcaagcttcgcccaggccaacgagacactggtggtggccgccacgccgatcccgcacgccgagatcctcgaactggtcaagccgaccctggccaaagaaggcgtggacctggaaatcaaagtcttcaccgactacgtgcagccaaacgtacaagtcgcagaaaagcgtctggacgccaactacttccagaccctgccgtacctggaaaacttcaacaagggcaagggcaccaacctggtcaccgtggtcggtgtgcacgttgaaccgttcggcggttactcgaaaaagatcaagaacatctctgaactcaaagatggcgccaccgtggccattcctaacgaaggctccaacagcggccgcgccctgttgctgctgcagaaagccggcgtgatcaccctcaaagacccgaccaacgccctggccacgccaaaagacatcaaggacaaccccaagcacctgaaattcaaggagctggaatcggccctgctgccacgtgtgctggaccaggttgacctggacctgatcaacaccaactacgccctcgaagccggcctgaacccggccaaggacgcgctgatcatcgaagacgccaagtcgccgtacgtgaacttcctggtggctcgcccggacaacaaggacagcgacgcgatccagaagctgtccaaggccctgaccagcccggaagtcaaagccttcatcgagaagaagtacaacggcgctgtagtgcctgcgttctgatgtaacccaaacccccttcaaggtttgaacgccgacggctgttacagcgtcggcgtttttttatgcctgaaatctggaatgcaatccaaatgtgggagggggcttgcccccgattgcagtggttcagtcagcatattttttgctgacccaccgccatcgggggcaagccccctcccacatttgatccgctttgatctagagaactctgctattgatcgccctgcgcagcgccatcaaccacttcaccagttcctgcgggtccatcggtttcgcttcgttcattgttcgatccctcgaatctcagacctccaaaccatagctctcacccgccaaacccgcgaatccgccggttatctttttgggtgatatcaatatgctatttcggtatttaaaatttgctttttatacctttaaagttcgcgctacccggcgttacccacgccggatcggattgcgctcgctgcattacccttgcggcgtcatggactggaaatgaccttcgatttcgcttttatcctcagcaccctgccggcgtttctaaaggccgtgggggtgacgctgcaagtgggcctgatcgccattgccacctccctgctggtggcgctgatcaacgcggcgctgctggtgtttcgcacgccgtacctgtcgcgcctggtggcgctgtatgtggagctggcgcgcaacacgccgctgctgatccagctgttcttcgtgtacttcgcgctgcccgccctgggcttcaatatctccgggttctgggcggcaatcatcaccatgactttcctcggcggcgcctacctcaccgaagtgctgcgcgccggtgtggaagcggtgccgctggcgcagatcgagtcgggcaagtccatcggcctgtccgactggcagctgctgcgccatgtgatcctgccccaggccggcatcctcagcctgccggcgctgttcgccaatttcatcttcctgctcaaggagaccaccgtggtctccgccgtggcggtgccggagattctctacaccaccaagaactacatcgccctgtactacaagacttacgaaatgctcgccgtgctgacgctgatttgcgtgttgctgttcctgccgctttcactgttgctcagccgtctggaaaggaggctccagcatggccagttcgggtcttgagttgttgtgggtgtcgttgccgcaactgggcaagggtgctgcgcaaaccctgtcgatttcatttttgagcatcgccttcagcactgtcggcggcgtgttgtatggcgtgctacgcaccttgaacaaccggctggtcaacggcgtgctgcgggtttacctggagttgttccgtgcgatcccggtgctggtgtggttgtacctgctgtttttcggcctgccgattttctttggtttgagcattccgagcttctggtgcgcggtgctggtgctgtcgctgtggggcgccagtgaagtgggcgaagtggtgcgcggcgcgttgcattcgctgccccgtggccagcgtgaagcgggcttgtcgattggcctgtccgacccgcagctgtacggctacgtgctgctgccgcaagcgctcaagcgcatgacgccgccgaccatcaacgtctacacacgcattatcaagaccagttccctggcggtgctgatcggtgtggtggatgtgatcaaggtcggccagcaaatcatcgagcgcacctatgagtccgtgttgatttacggcgtgctgttcctgtttttcttctttatctgctacccgttgtcggccgcctccaaggtgctggaacggcgctggggccaggcatgaacgcattgatcgagttccagggtttcaacaaattcttcggtgagcagcaggtgctcaagggcatcgacctgagcgtgcaaagcggtgaagtggtggtgatcctcggccccagcggctgcggcaaaagcactttattgcgttgcctcaatgggctggaagtcgcccatagcggcagcctgcgtttcgccggcaaagagctgttggacaagcacaccgactggcgccaggtgcgccaggacgtcggcatggtgttccagagctaccacctgttcccgcacatgagcgtgctcgacaacatcctgctcggcccgctgaaagtgcaaaaacgcgacccccgtgaagcccgcgaacaggcggaaaaattgttggcccgcgtcggcctggcggacaagcgcgacgcgttcccgcgccagctctccggcggccagcaacaacgcatcgccatcgtccgttcgctgtgcatgaacccccaggtcatgctgtttgacgaagtcaccgccgccctcgacccggagatggtcaaggaggtgctggaagtgatccagggcctggcccgcgatggcatgaccctgctgatcgtcacccacgaaatggccttcgcccgcgccgtcgccgaccgcgtggtgttcatggaggccgggcgcatcctcgaacacaacacccccgaggcattctttacgaacccgcaaaccgcacgcgcgcagcagttcctggagaagttctcctttgtttcaacactgccgaagaaaacccaggaactggagctgatatgaaaaagttactgctgccactgtttgccgtcgccctgctggtcggttgcgataaaaaggccgaagagccggtaaaacctgccgctgtcagttatatcgaaaaaatcaaagcgcgcgacaagctgatcgtcggcgtgttcaccgacaaaccaccgttcggcttcgtcaacgaagcggggcgctacgtcggcttcgataccgacatcggtcgccaattcgccaaggacctgttgggcgatgaaaacaaagtcgaattcgtcgccgtggagccggccagccgcattccgttcctgcaaagtgacaaagtcgacctgatcctcgccaacatgaccgtgaccccggagcgcaaggaagcggtggacttcaccaaccccaacctgaaagtcgcggtacaggccctggtgccgaatgacagtgcggtaaaaagcctggatgacctggccacccgcaccaccatcgtcaccaccggtaccaccgccgatatctggctgaccaagaaccacccggactggaaactgctcaagttcgagaaaaactccgagtcgctgcaagcgctgtcggctggccgtggcgatgcctacgcacaggacaatctggtgctgttcagctgggccaagcagaatcccggctaccgcgtgctggaagagaaactcggtgatgaagcgccgattgcgccagcggtgaagaaaggcaacatcgaactgcgcgattgggtgaatgccgagttggccaagttgggcgaggagaaatttttgctcaagctgtatgaccagtatgtgcgtaaagaactgagcgatgacaccaagcctgaaagtgtgattgttgaaggcgggaagtggcagggctgattgttgattgattgttctggcctcatcgggggcaagccccctcccacannnnnnnnnnnnnnnnnnnnnnnnnnnnnnnnnnnnnnnnnntgtgggagggggcttgcccccgatgaggccagagcagccaccgcctattccggccaatgccaggcgggggcatccaatatcccctgcccgacgatccgggtttcccccagcaccttctccagcaaaatcgaattacacccctcgtcctgctgcaacgccgcaatcaagcggctggcatgggacaccacccacacttggcactgccgcgacgcctggataatcaagcgcgccaacgccggcagcaaatccgggtgcaggctggtctccggctcgttcagcaccatcatggtcggtggccgaggcgtgagcagcgcggcgatcagcagcaggtagcgcaaggtgccgtccgacagctccgccgccgacaatggccgcagcaaaccttcctgataaaactcaatcgcaaagcgcccgccctgcaagggctcgatattcaggcgcgcgccggggaaagcgtcgctgactgcgcgctgcaatgcctcgggatcgccgatttcacgaatcgtctgcaacgccgccgccaggtcgcgcccatcgtgatgcagcactggtgtgcgcgtgcccagttggggttgacgtaccggcgcatccacatcgctgcgaaagtgatcgtaaaagcgccagccacggatgctttcgcgcagcagcaacacctccggcgaaccgcgcaggctgccgacctggtcgaacaggctgtggtagttgggcgtgtgctgggccagcacatcccaggcgcggccctcgcgggcgcgcaccatggggccggagcgctgcaccagcaggctggcggggcgatagatatggccggcccagatgcattccttctttacttccgggtccagggagaaatacgacaaggtcttttccggcagccccagggagatggcgtagctgaaatcttcagcggcaaagcccaggcgcaggcgtttgacgccttggcgcacgatgggctccaccggcacttccccgttgcgcatgcgtcggctgatactttccggcccggcccagaaggtcgaatccaacccaccctcacgggccaacgcattgatcactccgccctgggcggtttccgccagcaggcgcagggcgcggtacaggttggacttgccgctgccgttggggccggtgatcaggttcagccggtccaggggcaccaccaatttattgatcgagcggtaattggccaccgcgagggtcttgagcatgggcatccagtcggcgtgggaaccattggagtatgggagcctccatgcagataaggaaccctgaactaagctcacagtcgcatacacactggcacgtcggcatcacgcaaaaggagcctgcatgggcgctcgcatttccacctgtattttcggccttggcctactggcgctgttgagcggctgtggcgaagataaggctgaacccaaggcccattcgcgggtgttcgtgcagaccgtgcagccggcggattttgctgcggcggtgaccctcacgggtgatatccaggcccgggtgcaaaccgacctgtcctttcgcgtgggcggcaagatcatccagcgcatggtggacgtgggcgaccgcgtgaccgccaagcaagtgctggccaagctcgatcccaaggacttgcagaccaacgtcgactccgcccaggcccaggtcgtggccgaacaggcgcgggtcaagcagaccgccgccgccttcgtgcgccaggaaaaactcttgcccaagggctacaccagccgcagcgaatacgattccgcccaggctgcgttgcgcagcagccaaagcgccctggctgccgcccaggcccaactggccaacgcccgcgagcaactcggttacaccgcgctgatcgccgaagcacccggggtgattaccgcgcgccaggccgaagtcggccaggtggtgcaggccaccgtgccgattttcagcctggcgcgcgatggcgagcgcgatgcggtgttcaacgtctatgaatccctgctggtggagccgccgccggatgctccgatcaccgtcagcctgctggataaccccagcatcaaggctgtgggcaaggtccgtgaggtcacccccgccgtggccgccaacaccggcaccgtgcaggtgaaaatcgccctgcaggccttacccaagggcatggagctgggctcagtggtaagcgccaccgccaatggcccggccaaggccagtatcgaattgccgtgggccgcgctgaccaaagacctcagcgaacctgccgtatggctgatcgacggcgacggcaaggcgcagctgcacaaggtcactgtggcgcgttacctcaccggcaaagtcatcattggcgacggcctcaagggcggcgaaaaagttgtggtggccggcgggcaattgctgcaccccggcatgattctcgagatcgcccagccaggagcccagccatgaagcgcctcacggggatactcgccgccagcctgttgctggtggcttgctccaaggaagagccgccgcccgagccggtgcgcccggtgctgtccatggaagtgaagtcggaagaccaggaaaaccttggccgcttcgccggcaccatccaggcccgctacgaaagtaacttaggcttccgtgtatccggtcgcattgcccgccgcgccgtggacgtaggtgccgaagtggagaagggcgccttgctcgccgtcctcgaccccaccgaccaacagaaccaattgcgctcggcccagggcgatctggcccgcgtgcaggcgcaatacatcaacgcccaggccaatgcgcgccgccagcaggaactgttcaaccgtggcgtcggcgcccaggcccaattggatatcgctcagaccgacctgaagaccacccaggcgtccctcgaccaggcccaggcctcggtcaatcaagccaaagaccagctcaactacgccgaactgcgcaccgaccacgccggtatcgtcaccgcctggaatgccgaggccggccaggtggtcagtgccggccagcaagtggtgaccctggcgcgcccggatatcaaggaagcggtgatcgacctgcccgccggcctggccgagcgtttgccaccggacgtggtgtttctggttgccggacagctcgaccccagcgtgcacaccaccgccatcgtgcgcgagatcgaaccccaggcccaaagcgccacgcgcacccgccgagcacgcctgaccctggccgaaacgccgcccgcgttccgcctcggcacggcgatcagcgtaacgttgagtactgccatcgcgccgcgcatcgaagtgcccctgagtgccttgcaggaggtcgacggccagacccgcatctggctgctcgacacccaaagccagaccgtgcaaccgcgcgacatcagcgtggtcagccgcgatgccgacagcgccttgctcaacggcggcgtcaaacccggcgagcgcatcgtcaccgccggcgtgaacagcctgaaacccgggcaaaaagtcaaaatcgacgaggacagcccgcgatgaaagggagcttcaacttatccgactgggccctcaagcatcagtccttcgtctggtacctgatgttcgtcgcgctgctgatgggcgtgttttcgtacatgaacctgggccgcgaggaagacccttccttcaccatcaagaccatggtgatccagacccgctggccgggcgcgacccaggaagaaaccctcaagcaggtcaccgatcgcatcgagaaaaagctcgaagagctcgactccctcgactacgtgaaaagctacacccggccgggcgagtccacggtattcgtgttcctcaaggacaccaccagtgccaaggacatcccccatatctggtacctggtgcacaagaagatcgacgacattcgcggcagcttcccaccggggttgcaggggccgtcgttcaacgatgagttcggtgatgtgttcggctcggtgtacgcgtttaccggcgatggcctgtcgatgcgccagttgcgtgactacgtggagcaggtgcgcgccgagatccgttcggtgccggggctgggcaaggtcgagatgatcggccagcaggacgaagtgatttacctgaatttctctacgcgcaaactcgcggcgctggggattgaccagcgccaggtggtgcagagcttgcaatcgcagaacgcagtgacgccggccggggtgattgaggccgggcctgagcggatttcggtgcgcacctcggggcagttcgcctcggagaaggacctggccaacgtcaacctgcggctcaatgaccggttctatcgcctggcggatatcgcggacatcagccggggttatgtggacccggcgcggccaatgttccgcttcaacggcaagccggccatcggtctggcgattgccatgcagaagggcggcaatatccagtcgttcggcaaagccttgcatgagcgcatggacgaactcactgccgacctgccggtgggcgtcggtgtgcacaaggtgtccgaccaggcggaagtggtggaagaggccgtcggcggctttaccagcgcgttgttcgaagcggtgatcatcgtattggtggtgagctttatcagcctgggcatgcgcgccgggctggtggtggcgtgctcgattccgttggtgctggcgctggtgttcgtgttcatggaatacagcggcatcaccatgcagcgtgtgtccctgggcgcgctgattatcgccctcggcctgttggtggatgacgcgatgatcaccgtcgagatgatgatcacgcgcctggaaaagggcgagaccaaggaacaggcggcgacctacgcttacacctcgacggcgttccccatgctcaccggtacgctggtgacggtcgcggggtttgtgccgatcggcctcaacgccagctcggcgggcgagtacaccttcaccctgttcgcggtgattgccgtggcgatgctggtctcgtgggtggtggcggtgctgtttgcgccggtgatcggcgtgcatatcctcagtgccaacgttaaacctcacaacgcagagccggggcggatcggccgggcgttcaatggcggcatgctatgggccatgcgcaaccgctggtgggcgattggcatcaccgtggcactgtttgtggcgtcggtgttttccatgcagttcgtgcagaaccagttctttccctcgtcggaccgcccggagatccttgtcgacctcaacctgccgcaaaacgcctcgatcaacgagacgcgcaaggctgtcgaccgcctggaagcgatcatcaaggacgacccggacatcgcccgctggagcacctatatcggccagggcgcgatccgtttctacctgcccctcgaccagcaactggaaaacccctactacgcgcagttggtcatcgtgagcaagggcctggaagagcgcggcgagttgatcgcgcgcctgcaaaagcgcctgcgtgatgacttcgtcggcatcggcagttacgtgcagccgctggaaatgggcccgccggtgggcaggccgattcagtatcgcgtgtcgggcaaagacaccgaccaagtgcgcaaacacgccatcgaactggcgaccttgctggacaagaacactcacctgggcgagatcatctacgactggaacgagccgggcaaagtgctgcgtatcgacatcgcccaggacaaggcgcgccaactggggctgtcgtcggaagacgtggcgcagttaatgaacagcgtggtcagcggatcttcggtgacccaggtgcatgacgatatctacctgatcaatgtggtcggccgtgccgaagacgctgaacgcggtacgccggaaaccctgcagaacctacagatcgtcacgcccaacggcacctcgattccgctgctggccttcgccaccgtgcgctacgagctggagcagccgctggtatggcgtcgcgaccgcaaaccgaccatcaccatcaaggcctcggtgcgcgatgagatccaaccgacggacctggtcaagcagctcaagccggaaatcgacaaattcagcgccggcctgccggtgggctacaaggtcgccaccggcggcaccgtggaagaaagcggcaaggcgcagggtccgattgccagcgtggtgccgttgatgctgttcctgatggcaaccttcctgatgatccagctgcacagcgtgcagaagatgttcctggtggcgagtgtcgctccgctcgggctgattggcgtggtgctggcgttgatccccacgggcacgcccatgggctttgtggcgatccttggcattctggcgttgatcggcatcatcatccgcaactcggtgatcctggtgacgcagattcatgagtacgaggtggccggctatacgccgtgggatgcggtggtggaagccaccgagcaccggcgccggccgatcctgcttacggcagcggcggcgagcctgggcatgatcccgattgcccgtgaagtgttctgggggccgatggcctacgcgatgatcggcgggatcatcatcgcgacgttgttaacacttttgtttttgcctgcgctgtacgtagcttggtacaagatccgggagcccaaaccagagcagagctgaacatgcatcactccctgcgccacggtctgttgatttgcacgctgttgctgtcacccgtggcttttgccagcaccgtattggaaaaccccctgtggcgggtcgaactcgacccggccactctcgccatccgtgtgacgcccaccgggcaggcggcggtgcaagcctccagcggcttgccggcccgtgccgtcagccagcttgtgcagagcgatcaacaggccagttggcagtgggatgacggcgccttccgggtgagcgccagccttgaacagcgcgacctcaagttgaccctgcgcgcacgtgagcctggcgagctgcccatcctccggcaacccgccagcgccctgggcaaagggctgatgtggccattggccgaagggcattacgtgcctgccgacaacgctgtgtggaaaacgtttttgcaggaacaaggtgacctcaacaccacccaggacctcagcctgccgctgtggggcctggaccacgggcgcttcaccttgaactggttgctgaccaacccctacaacaatcgcctgcgctggcaggcagggatggcgctgtccgtggcccacgaattcaccgcgctcgaccctgctgcgccgatgaccctgctgttgcacctgggggaggccgatcccttggccggcgccaagcgctaccgccaatggctggtcgagcaagggcgttatgaaccgctgtcggacaagctgcggcagacgcccgaggcacagaagctgctgggtgccagccatgtctacctgtggggcaatgacctgctggcagcggaggatgtgcgtgactggccgttgttgctcaagcgcctgcgtggccatgagctcaaaggcttgctcgacaaggaatcgacgaaagtcctggcgcaggccacgcccttgaatcgctatgagcagacggcgctgttgcgggggctgaatgcggccatcaaccggaaggccaggcagagttggcaggtagatgagcctgacatgccgcgcctcgctgcacgttatggtgagctgcgcggcgagttggctgtcgcgtttgccggggcgctgagcgatacccctcaaacctggggcagccgggcgatccagtcgctgcgtgactcaggtctttcgcgcttgctgctgaccctgggcgaaggctgggagggcggcctgtggcaccccgaagcgatccgcgccggggtcgatgcgggttacctgatggcgccctacgattcctatgaaactgcgttgtccgccacggaaaatccggattggaccaccgctcacctgggcagcagggcctaccgcgagtgcgcgattgtgctgaaggatggcaagctgaaaaccggcttccagcagtccggccactacactgacccgcgctgcgtgcgccctctgttggaggcccgcgtaaaggctatccaggccaaggctggcttcaacgcgtggttccttgatgcctatgccaccagcatggtgttcgacagctaccgcgacggcgcccggatgacccaggcgcaaaacgccgagggcaatatcgacgcctcgcgctggctcaacaccgtgctcaaattgccagcgggctccgaagacggcaacgccatcaccacccaaggcattctgttcgcccatggcatgcagacgccggtgattggctggggtgaccaggccatgaccaaagacaagcaatcgccctactacgtgggcaattggtacccgccggagcagccgacggtgttcttcaagccggtgccgctcaaagagccgtttcgcacggtctactttgagccgagcatgcgcctgccgttgtaccaggcggtgttccacggctcggtaatcaccacccaccactggctgttcgacagcctgaagctgagcaatgtgcaggctgaaaacgagctgacgcaactgctctacaacgtgccgccgctgtatcacttgaatgcctcgaccgttaagcagcgcctgccgctgatcctgcgtcaggatcggtttttccggccgctgcaccagcgtttggcgacccaggcgatgacggattttcgttggctgacgccggacaggcaggtgcagcaaaccacctttgccgatgggacgcggttggtggcgaattttgctgcgacctcgagagagggctatgccggacgcagtgtgactgcatatggggtgggtgagaaaccgctggtgtatcaggtggagtagggttgcctcagcaggcgtcatcgggggcaagccccctcccacatgttgactgtattcacatatcaaactgtgggagggggcttgcccccgatggcgtccgaccaggcaacgaaaatctaccgcttgcgccacacactcgccaaccagggttgctgcgccctgggcaaccccgccggccggtagtaatgctccaactccacaaacccggcttgcgtcaggagtgattgccacgccgccaggtcgtgataagacccataccgcggcccattccagccttcctggttctcgccccgagggttggaactgaacaatacgccccccgctttcaacgcgccatgcagttgcttgagcacacgcggcaattcctgcttggggatatgaaacagcaccgcattggcgaagaccccgtcaaagcgttgagccggcaggtccagcttgaggaagtcctgctgcaacacctcacagccactgtcctcccgcgccatctgcgcaaagcgctccgagccgtccaggcccacggcgatatgccccatgcgcgtgaaggtctgcaaatcacgccccggtccacagccgaaatccagcagggtaaacggcgccgtaccctggatatgcctcagcaaggcatcgatgttctggctcacatcgtgatcgcgggtgccttcacggaagtcgtcggccactttgttgtagtggccgagggtggtggcggtgatggtgctgaggtcgtcgggcttgagtgtcatgacggggaataccgtgcgtcttcgatggcccgactatacctcacctcttgttaaggacccgcgccaaccgatccccacccaactgaatcaccgccaccagcgccaccagcagcacaatcaccgtcaacatgatctgcgtatcaaagcgctgatacccgtatcggtacgcaatatcccccaagccccccgcgccaatcgcgccggccatggccgatgagttgatcatggtcaccagcgtgatggtgaacccgccgacgatccccggcagcgcttccggcaacagcacgtgccagatgatgtgccagcggcggcagcccatggcttgggcagcttcgatcaggccgtggtcgacctcgcgcaggctcacttcggcaatccgtgcaaagaacggcgtggcggcgatggtcagcggtacgactgcggcccacacgccgtaggtggtgccgacgatcagccgagtgaacgggatcaacgccaccatcaggatcagaaacggaatcgagcggaacagattgacgaacgcccccagcacgcggttaagcgctggcgcctggtagatgccgcctttgtcgctggtgaccaggaacaccgccagcgggattcccaccagcagcgcgatcagcgatgacacgccgaccatcagcaaggtgtcgatggcgccttgtaccaatcgatcaaaccacatagcccagcacctccgtctgttgtgcccaattcccggcccgtttgcgcagttcttcggcgctgtggggcgagccattcaccgccagcagcaattgccccagggcatgcccctggatgcgttccacgccgccttgcaacaggcgcacgcggccgccgagggcgctgaacagggcggccaggtcgggttcgtcggtgtcgccgccggtgaattgcaaacgcagcaccagcgccgcgtcggccgtcgccggtgtggcctgcaggcggctttgcagttcatccggcagcccgtgttgcagcggtgtcagcagggtttggctgacttcatgttgcgggttgccgaacacctgccaaaccgggccttgctcgacgatgcgcccatgttccagcaccaccacgcggtcgcagatctcgcggatcaccgccatctcgtgggtgatcagcacgatggtcaaacccaggcgccggttgatctcgcgcagcaggccgaggatcgattgagtcgtctccgggtcgagggccgaggtggcctcgtcacacaacaggatctcggggtcgtgcaccagcgagcgggcaatgcccacccgttgtttctgcccgccggaaagctgcgccggataagacttgtgcttgtcctgcagccccaccagttccagcagctcacgcaccttttgctcgcgctgctgcttcggtacgcccgccactttcaacggcaactcgacgttctgccacaccgtcttggccgacatcaggttgaagtgttggaaaatcatgccgatgcgccgacgcagggccaccaggcggtcttcgtcgaagtcgccgatgtccacctgatcgatcagcacccgcccgctgctgggttgttccaggcgattgatggtgcggatcagcgacgacttgccggcgccgctgcgaccgatgatgccgaacacttcaccgcgctggatcgccaggtcgatgccttgtaacgcatgcaccgtgccgtcgtaggtcttgcccaagttgataaaacgcacatgggcgcgattgagctcggggtgcagttcggtctgttcggcgtccctgggcggcaggcccaggtcgcgcagtggggcatgggcggcggtcattttttatcttcccagccgacttggtagagcttgccgagggacttatccaaggcggcacgcaccaccggcgaatgctggtagatatccacaaacttgatcacccgtgggtcggtcttgcttttgggttggatcacgaactggatcacgtactccggatggtcgaggccgtcgaacagcagcgccgactcggcatcgaaggtcttggacaggcggatatacgccgggtagccctgcaccaggtcggcatcgtcataggcgcgcaccagttgcaccgcttcgacctgcaggatcttgatcttcttcgggttggaaacgatgtcctcttcggtggccttgtagcccacgcccggcttgagcgtgatcagccccgccttggccagcagttgcaggccccgaccgctgttgatcgggtcgttggcaattgccacgctggcgccctggggcaggtcgttgatgctcttgtacttctttgagtacagcccgacgttgttgatgatgcccggcgcataaggcaccaggtcaaaaccggcggcggccttggcgttttccaggaacgggatgtgctggaagtagttcacgtcgatatcgccagcagccaggctgacgttgggtgcgatccagtcggtgaactccaccagctcgactttcaggccttgcttgccggcttcggccacggcggcttccagaggaatcgcaaaggcggcggtggtgccgattttcagcggtgcatcggcggcgaataccgccgagctgaacagtccgaacgccagggccagtgctttgactggatgggtgagcagtgtctttttcattgggtatttccagtcagagaagcagtttgtcggtaggtggaaccggtgtgttgttcgggtaggcgggcgctgccctggaagactttttcccgcagcgttccctgttcgtattcagttttgtacgacccgcgcttttgcaactccggcaccaccaggtcaatgaagtccacgtagctttccggcgtaacgatgcgcgtgaggttgaagccatccaggccggtttcgccgatccaggattccagctcatcggcgacctgtccgggcgagccgaccagggtgatgtagcgcccgcccagggcgtgctgctccagcaatttgcgtcgggtccagtcgttgttctgcaggttcttggtggctgactggatcgcgttgctcttcacgtattggatcggttcgtccagtgcgtattgggcaaagtcgatagcggtggatgcggaaaaatgcgccacgccagcctccgcgctggcgtagctcaagtattccgcgtgcttttcccaggcaagttcttcggtggcgcccacgatcacgttgaggcccatgaacaccttgatgtcatccgggttgcgcccggccgcgaccgcgctggcgcgcaccttgtccacctggaccttggtcgccgccttgttctgcccgctgatgaacacgcactcggcatgccgcccggcgaacagcaaaccgcgctccgaactgccggcctggaacagcaccggtgtacgctgcggcgagggttcgcacaggtgataaccctccacctggtagaactcgccctggtgcgcgactttgtgcaccttgcccggctgcgcgtacacccgcgccttgggatcgttgagcaccgcgccgtcttcccagctgccttcccagagtttgtagagcacctccaggtattcatcggcctggtcgtagcggcggtcatgctcgacttgttcagtgaggcccatggccttggcggcgctgtcgaggtagccggtgacgatgttccagcccacacggccacggctcaggtggtccagcgtggacatgcggcgggcgaacaggtacggcggctcgtaggtgaggttggcggtgaggccgaagccgaggtttctggtgacagcagccatggctgagaccaacagcaacggatcattcaccggcagctggatcgactctttgagcggcacatcaatcgagttctggtacacgtcgtacacaccgacgatatcggcgatgaacaaaccgtcgaacagcccgcgttcgagggtttgcgccagctcggtccagtactcgatcgtcttgtactgggtcgaagtgtcccgtggatgcgtccacaggccgtggttgatatgcccgatgcagttcatgttgaaggcattgagcaggatttttttcttcgccatcaaatggtcccccgcagtggcgggttttcatcgttcaggtagtaattacccaccgcgtggtacttccagcgcaccgggtcgtgcagggtgtgcacgcgggcgttgcgccagtgacggtccaagccatgttcagccagggtcgcctggctgccggccagttcgaacagggtgctgccggcggccagggaaatttcggtgctcaaggcgcgcacttccgcgaccgcaatcgaggcggcagcgacggtctcggtgttgctgtcggcctgggcgcggtccaggtattcgcctgagcgctccagcagcgcctcggcggcgtgcaggcggatgctcaggtggccgaagcttttcagggtcagtgggtcttcggtggccttgtcgttgccggcgtcgatccacgggcgggtcttggtgcgcacaaagtgcagcgcatcttcaaaggccgcgcgggcgataccggtgtcgatggcggcatgaaggatctgcgccagcgggccgacggtggtcgggcgttcgaaggcgctctggaacgggatcacgtcctgcgcggctacccacacattgtcgaacaccaccgaaccgctgccggtggtgcgctggccgaagccgctccagtcgtcgatcacgctcaggccttcactgtcacgcggcacaaaggccagttgctgtacgccgtgttcatccaccaccgaggtgggaatgcgctgggcgtagatcgcgccggtggaatagaacttgcggccgctgatgcgaaaaccgtcaccgtcgcgggtgattttagtgacgcggtcatgggccgtcttggtgcccagttccgccagggcgttgccgaagcgctggccggcaagtacctcggcgtacaggcgtttttgctgcgccgggctgccgtttacgcgcagcacttccagggcgtagaaatggttctgcgggatctgccccagggacgcatcggcctgggctatcaaggcaatcaccttggccagggtgacgttggacacgcccgcgccaccgtactccttgggtacgctgatgccccacaggccggagcgtgaaaacacgtccagttcgggcagcggcaggcggcgttcgcgatcgcgctgggcgctgtcgcggcgaaagtcttcggccagatcactggcgacaacaagggcttgttcgtcgctggtgatgaccgcgacgtttgcagagaaagtcataggtgttctccagaggtctggtcggtcagatccaggaatggcgagctggcaaggtgccgttcaatcgataggcgccgacggcgtgatacttccagcgcaccgggtcgtgcagggtgtgcacccgggcattgcgccagtggcggtcgaggttgaattcggcgagggtggcgcggctgccggccagttcgaagagtttctcgctgaccagcagcgacacttcggtggtcagcaccttggcctcggccacggcgatggaggcacgcgcggcggattgcgcggtgatcggtgcggcgctgacctggtccagcacttgtcccgccttgcgcagcagggcttcggcggcgtgcagttcgatcttgagcttgccgatgtcggcgatcacatacaggtcgtcactggcgcgttcgaccttggcgtcgatccaggggcgcgagcgttcgcgtacgaaggcgatggtgtcatccagcgcaccacgggcgataccggcgtcgatggccgcctggatcacttgcgagacggcgccctggatatttggtgtctcgccgatgcgccagttttctaccaccagctcggcctccaccggcacctgatccagcagcaccgtgccgctagcggtggtgcgctggccgaagccggaccaatcgtcaacgatgcgcagcccttcggtaccacggcgcacaaatgccatgacctgcttgccgtcatcgttcaacgccttgaccgccacccaatgggcaaacagtgcgccggtggaatagaacttttggccgctgattacgtaaccgtcacccttggcggtgatgcgcgccttgagctccagagtgtttttggtgccgcgttccgggccgccattgccgatgcgccagccgtcgagcacgctctggaacagctgttttttctggcgctcggtggcggcgccctgcaacaggtgcaggatgccgaagtggttctgcgggatctgcccgagtgccgggtcggccgcgctgatgattgcgaacacctcggccagggtcacgaaagacacctgcgggccgccgtactcacggggaatggaaatactgccgagcccactgcgggtgaactgctcgatctgcgcccacggcagtttgcgttgctggtcgcgcctggcggcttgcaggcgcgccgcctgggccaactcatgggcagccttcagcgcctctgcatcgttgcgcagcacggtggccggcaacagcaggggggcgacgtccagatcattctgggggggtgttagagccaagttagacatcagcgccgctccttggctgcacgtaatgccctggcgttgcgcaccggggtaattctgaccataccgacctcgcattcaatgaaataaaaacagaaaaatcagagatgtccggtggtccggtgcatataccctaagcgtgttaaatatttaaataaactaacttttgggaatatgcatagaaggtctgtcacccaggttcgcagggagagcccagagttcgtggctggtaaatcagcgcgctccccgccgggcgggacggtgctcctgctgcgatgcgcaaggtgcgcgcgggtgcccagagtgaattgttgccgacacgatcgagaatgcagtacgtcacctccagccggcagtcgtcaccgccttcgagaatcaccgtcgaaggcacccagacctgcacggcctggccgacttcccgggcctggaccttgggcaggtccaggcgcacatcgccccagcgcaaggtgatggcgtcgccgctggccatgttcaggtacggctcgatggtcaggggaatgccgcgtcgcccctgcccggcgttgacgccgtagcggcggatggtgtcgggcaggcccacgggggcgaggttctggttctcatcgaggtacaggggcgacggctggccgcccgggtagagggtcttgacgcggactcgggtcaccgctgagcgagccggagcatgaccgacctgcatgacctggtaatgcacacgagccgggccatcgaacacgaaactttccggtactcgcaggtgagtgaccgcgccaatcctgccggcggtgacccggcgtgaagcggcgaagcagttgttccagaacagttcgatcaggtcgccttcatccatgccgggatacgcagcgatgtcgacctgcaagtgggtggcggccaaggcattgatgccattgccgatggcctggggcagtgtcggggcagtgagcagggggcgtgtcataagtcatctccttgatgcagccagcagccatcgttccggccctttggcgtgggtgcacgcggtgggccgaaaagaacgattcagtgaatagccgggataggatccaatcctctgggcgctagataagagggttggccgagggccgtcaatggcggcaaagggctaaatggcgggtttggagatattcagaacggtccgactgaggcggggatattcaggtaggtgcgctggggtgttttacccgcgggaacgacgatcccttgtaggagcgagcttgctcctacaaagggtatcagtgggcgaggaatttgctcaggaactgcttggtgcgctcttccctggggttggcgaacaacgccttggcttcaccttgttcgacgatcaggcccttgtcgaagaagatcacccggttggccacatcccgcgcaaaactcatctcgtgggtgacgatgaccatggtgcggttttcttcggcgaggctgcggatggtcgccagcacttcaccgaccagttccgggtccagcgccgaggtgggttcgtcgaacaggatcacctccggctccatggccagcgcacgggcaatcgccacgcgctgctgctggccgccggacaggcgccgtgggtaggcgtcttccttgcctgccaggccgactctggccagcaacttgcgccccaaagcgatagcctcttcgcgtggcatcttcttgaccacggtggggccttcgatgacgttttccagcgcggtgcggtgggggaacaggttgaagttctggaacacaaaacccacgtgctggcgcaggcgccgcaccaggctttgttgctggttgatcggcttgctggtgtcgatctcgatgtcacccaccttgatgcggccgctggtgggttgttcgaggaagttcaggcagcgcaggaaggtggtcttgccggaaccgctggggccgatgatggcgatgacttcgccttccttgacctccaggtcgatgccgttgagcaccacctgacccttgaattgtttggtcagtttttcaaccacgatcatgcttcaggactccaggtcatgccggttgacccggtcttccaggcggttttgcaaatgcgccaggatgctcgccaaaatccagtagatcagcgcagcggagagatacatggtgaagatttcgaaggtccgtgccgacaccagttgcgcctggcggaacagctcgggcacctggatagtggcggccagcgccgtgtccttgaccagcgaaatgaagctgttgcccagcggcggcaaggccgtgcgcatcgcctgcggcaggatggcccggcgcagggtctgcgcgcgggtcatgccgatactggcggcggcttcccattggccgcgctcgatggaaccgatggcggcgcgcaggatttcacaggcgtaggcggccatgttgagcgagaagccgatcatggcggccgggatcggatccagctcgatgcccacttgcggcaagccgtagtagatcaagaacagctgtaccagcaagggcgtgccgcgaaagaacgacacatagactcgggcgagccagctcaccagcttgaagcgcgacaggcgcatcaaggccaggccgaagcccagcagcaagccgaaaaacatcccgccgaggctgaggatcaccgtgtaatacgcgcccttgagcagaaagggcgcggagtccagcgcgagttggaaacctgcttccattattgagtgacgtcagcgttgaagtacttctcggacagcttcttcaaggtgccgtcggcgcgcagtttgtcgagcgccttgttcactgcatccagcagttctggctcacccttgcgcagggcgataccggcttcctggcgggagaaggcgtcgccggcagcagcggtgtccggggctttcttggcgtattccagggcggccaggcggtcgatcaggatggcgtcgatacggccgatgcgcaggtcctggaacttggtcgggtcgtcgttgtaggtcttgatgatggctttgggttgattgtccttgagccattgttcgtagttggtgcccaggcccacaccgactttcttgccggccaggtcgtcggcggtcttgatggtgtcgacgtttttcttcaggaccagcgcctggataccggagacggtgtaaggcttggagaagtcgtatttctttttacgctcatcggagatggtcacctggttgaccacggcgtccaggcgcttggattccagggcggcgaggatgccgtcccacggagtcgcttgcagcttgaccttcacgcccagctctttagccagtgcttcggacagctccacttcgaaaccgctgagcttgccgctttcatcgacgaagctgaacggcgggtaggtaccttccaggccgatcttgatctcgccggctttcttgatgttgtccagctgatcacccgcgactgcttggccgatcaggccagccccgagtgccaggcccaaagtgccaaccagcaacgtgcgacggaatacagaaatagtcatgaagagcccctgtgtttttatggtgtgcgaagcaggtgacgcagtagtcgtatcctgccttaaagcgcgtagcgcgtcttcgcctacggcgcgactataaagccggtttttaagacttgaaaataatataaataaaatctgatattccaatattgaatatcaagagattctaatgtgggaggggggcttgcccccgatagcggtgtatcagccacagaagtcatgactgatactctgtcatcgggggcaagccccctcccacatttagtccgcgtttattcagttgaaggcactgttgtaggcaaacaacgccggcgccccgccggtatgcaggaaaatgatcgggccatcctcgaagcgctggcgcccgataccgtccagcaagccggccatggccttgccagtgtagaccgggtccagcagcaggccttcctggctcgccagtaacttgaccgcagacagggtgccggcgttcggttcgccatagtgcgggccgaaatattcgtcccacaggatcaccttgaaggcctcgggcatatccacacccagcaattcggcggtgcgttcggccaggccctgcactttcgggaactgggcttcttcggtgcgcgatacggtgataccgatcacgggcaactgcggcagcacttcactcaacgccagggccaggccgctgtgggtacccgcgctgccggacgccagcaccacggcggcaaactcgatgccgctgtcttcgatctgcgcggccagctccaggccggcgcgcacatagcccaacgcaccgagggcgttggagccgccgataggcaccaggtacggctgcttgccgttgctgcgcaggcggtcggcgagggcgttgagctggtcgtcgacgttgtcgaggttctctaccagctccaccttggcgtcgaacaggtccagcagcaggcggttgccgttgcccaggtagttggggtcatcggtgccggtggggttctccagcagcgcgacgcagcccaggccgagcttggcggccagcgcggcggtctggcgcacgtggttggactggatcgcaccagcggtcaccagggtgtcggcgccttgggcgatggcatcggcggccaggtattcgagtttacgcagcttgttgccacccatggccagcggtgtggtgtcgtcgcgcttgacgtagatgtctctgcccaaccaggccgacagccgctcgagtttttccagggcggtggcgccacccagcagttccaggcggttaaaacggtcgagctgttgtttgatcatggctacgcacggttgatgaggatggggcgactataggcaggcacttttcatcgggcaaccgccaatcgcttattccggatggttcttagtattgcaccattggttcttaagggcggccagggtgcataccgtaaagtgagcgccattacgtcaggagtgaaaaccgtgagtgagcgttccagtcattggcaattacagaccatcgtcagccagttgcgcggcgcccgggaccagtggcgcacgcgcaatggtcgcttgagcggtgagcatggtggccgcgagttaccttctcgcgaggcggtggcgcagattctggagtcgctgtgcggtgcgttgtttccgatgcgcctggggccggtggacctgcgtgaagaaagcgaagatttctacgtcggccacaccctggatgtggcgctcaatgccctgctcggccaggcgcgcctggaactgcgctacgccgcgcgccagagcggcgaggacgacagcgccgttaacgcccacgccatccgcttgatccaggatttcgccctggccttgccgtccctgcgcagcctgttggacaccgacgtgctggccgcctaccacggcgacccggcggcgcgtagcgtggatgaagtgctgctgtgctaccccggcatcctggcggtgattcaccatcgcctggcccaccacctgtaccgcgccggtctgccgttgttggcgcgcatcagtgccgagatcgcgcactcggccaccgggatcgacatccaccccggcgcgcagatcggcccgagtttctttatcgaccatgggaccggtgtggtcatcggcgaaaccgcgatcatcggcgagcgcgtgcgcatctaccaggccgtgaccctgggcgccaagcgcttcccggcggacgaggacgggcagttgcagaagggccatccgcgtcacccgattgtcgaggacgatgtggtgatctacgccggggcgacgatcctggggcgcatcaccatcggcaagggctcgaccattgggggtaacgtatggctgacccgcagcgtgccggcgggagcgaatatcacccaggcgaatttgcagcatgaagatggtgcgcagaagtaagcagcatgcttaccgaatgtgggagggggcaagccccctcccacattttgtgtgcatttcacctccagactgctgaacgatttcctcttctcgcccgtcataccaatccttgagctagtgtaggaatcacctaccactcagccctgcgattagtcccagaccgcctatccatgtttaacttgaatgttcgttcaagttaaacccggtggttcgctgcccgctcacaacaggaggcttacctttgctgagtccgttattgacagccacatccctcaccctcggggtgcatcgttcatgagtgcatcgtccaccccatccagcggcctggtgcgcatgaatgcgccggtcttctactttgccgcgacgtttatcctgctgttcggcatcaccgtcatcgctatcccgcaacaggccggtgcctggctgctggcggcgcaaaactgggcggccaacacggtcggctggtactacatgctggcgatgaccctgtatctggtcttcgtggtggtcaccgcgctatcgggctacggcaagataaaactcggtgccgaccacgacgagcccgaattcagttacctgtcctgggccggcatgctgttcgccgccgggatcagcatcacgctgttcttcttctgcgtctccgagccgctgacgcacttggtgcaaccgccgcaaggcgcgccgatgaacgccgacgccgcacgccaggccatgcagattctgtttttgcactggggcctgcatggctggggcgtgttcgcctttgtcggcatggccctggcgtacttcgcctaccggcataacctgccgctggcgttgcgctcggcgttgtacccgctgatcggcaaacgcatcaatggccccatcggttacgcggtggatggcttcggcatcatcgccacggtgttcggcctgggcgcggacatgggttttggggtgctgcaccttaactcagggctggattacctgttcggcattgcccatacccagtggattcaggttggcctcatcaccctgatgatgggcgctgcgatcctggtcgccgtggccggcgtcgacaagggcgtgcgggtgatgtccgacatcaacatgctgctggcctgtgcgctgctgctgttcgtgttgttcgccggccccacccagcatttgctcaacaccctgatccagaacatcggtgactacctgggagccttgccgaccaagagtttcgacgtgtatgcctacgacaaacccagcgactggctgggcggctggaccgtgttctactgggcctggtggattgcatggtcgccgttcgtgggcctgttcatcgcgcgtatttcccgtggccgtaccatccgcgaattcgtgttcggcgtgttgctgatcccgctgggtttcaccctggcgtggatgtcgatcttcggcaacagcgccatcgaccaggtgctcaaccacggcatggccgcactcggccaatcggccatcgatgacccgtcgatgagcctctacctgctgctggaaacctacccgtggagcaagaccgttatcgcggtcacggtgtttatcagcttcgtgttcttcgtcacctcggccgactccggcaccgtggtgctgtcgaccctctcgtccaagggcggcaacgccgatgaagacgggccgaaatggctgcgggtgttctggggcgcgatgaccgcgctggtcaccagtgccttgctgttcgccggcagcatcgactcgctcaagtcagcggtggtgctgacctcgctgccgttctcgatgatcctgctgctgatgatgtgggggctgcacaaggcgttctacctcgaatcgcagaagcagatcgcccagttgcactcgctggcgccggtttcggcagcgcgcaaaggccggggcggctggcgtcagcggttgagccaggcggtgcatttcccgtcgcgggatgaggtgtatcgcttcctggaatcaaccgtgcgcccggcgattgaagaggtgacggcggtgttcgtcgagaagggcctgagtgtggtcacccagcccgacccgtccaacgacagcgtcagcctggaaatcggccatggcgagcaacatcccttcgtctatcaagtgcagatgcgcggctacttcacgccgtcgtttgcccgtggtggcatgggctccaaagagatcaacaaccgtcgctactaccgggcggaagtgcacttggccgagggcagtcaggactatgacctggtcggctataccaaggagcagatcatcaacgacatcctcgaccaatacgagcgacacttgcagttcctgcacttggtgcgttgacgctcaacgcagacctgtcagagaagctttatgtgggagggggcttgcccccgatagcggagtgtcagtatccgatgagctggctggcataccgcaatcgggggcaagccccctcccacaaaagtatgtgcaaggccctgaattttcgggttttcttaaatttaatttcatccgtcgcccgcctgttttgacgcgcaactgtcatctggccactgcgtaattgtgtgaagcgtttgacgctttcatttcagaacagtgacggagaccggtaccaatgaagacgttgataagccctatggtgggtgccgccatggcgagctttatgctgtccgcccatgccgattttatcgatgacagccacgccgatgtgaccctgctcaaccgctacctcaaccagcaggggcgtgacgtggtgaacagcaacgccaaggcccacagcattcgcgattggggccaggggtttgagttcaacttcaagtccggctacaccgaaggcccggtggggtttggcctggacctgcaggcgttctacgggttgaagctagactccggtggcgatctcaacgacaaggatcaccagggccgctaccccggcagcatgttcccgctggacaacggcaagtccgccgaccagttcggcgtgttgagcccgacgttcaagatgcgtttcgccaaggacgagttgcgcctgggtacgctctacggcaacaacccggtgctggccaacaccgacgggcgcctgtaccagcagaccaataccggtgtgcaactggtgtccaaggacctcagtgatttcaccttcaccggtggcgatatcttcaagaccaagatccgcaacgaaaccggcgaccagggcatgattaccgccggtggcaccaaagagagcgatcgtttcctgttcggcggtgcggactacaccggcatccagaacaccacggtcagcctgtggtactccaaccttgaggattactaccagcagttcttccttggcgccaagcgccatgatgccttgtcggtgggcgctatcgacaccgatgtgcgggtgttccgcagcctgggcgtgggcggcaacgccgatggcgacaaggacttcgcggcggccggcctctacggtgacggcactggcaagggtcgcatcaaccagaccaccgccagcctgcttgagagctacagcctggacgggcataccgttggcctgggcatccagaaaaacagcggcgacagcgactttccgtacctggattccggcctgaacagcggtgacaaccgccaaggcccaggctcaggcgccgacaccccggcgctgaccaatatgcagttgaataaatttcaacacgccggtgagcgtacttggcttgcgcagtacaagtatgacttcggtaagctgggcctcacgggcctgacgttctcggcggcctacgcccacggtgatgacatccgcaccgtgcagggcaccaccagcgagtgggagcgcaacattgccgtggcttaccaagtaccgaccggcacccttaaaggcctgggcgtgacctggaaaaatgcgcacgccagcccggatatcaccggtgccaccgtgcaggatgaaaaccgcttctatgtgagttatgtcgttcccctctggtaggcaattgctgtagaacggaacggcagacttaagcgattcagctgcttaaaaggcctgggaatagcgttattcccgggccttatttgtcccaagttcaagagaggattcgatgacttacattgctgccgaaaaccgctatgaatctattccgtatcgccgcgtaggccgcagtggactggtgctgcccgcactgtccctggggctgtggcacaactttggcgacagcaccccgatcgacacccagcgcgccctgctgcgcaccgcgttcgacctgggcatcaaccacttcgacctggccaacaactacggcccgccctacggcagcgccgagatcaacttcggccgtttgctgcgcgaagacttcaagcactaccgcgatgaactgatcatctccagcaaagccggctgggatatgtggcccggtccatacggccagggcggcggctcacgcaagtacgtgctggccagcctcgaccagagcctgcaacgcctgggtgtcgactatgtggatatcttctactcccaccgttttgacgccgacacccccctggaagaaaccgccagtgcactcgctactgcagtgcaacaaggtaaggcgttgtatatcggtatctcgtcctactcgggggtaaaaacccgcgaaatcgccgccctgctcaaagagtggaaagtgccgctgttgatccatcagccggcctacaacctgctcaaccgctgggtggaaaaagacctactggacaccaccgaagaactcggtgccggggtgattgccttcacgccgctggcccaggggttgctgaccgacaagtacctcaacggcgtaccggcggatgcgcgggtcaaccgtccgggtggtggttcgttgcaggccaagcacttgtccgaagccaacatcgcccacgtgcgtgcgctgaatgaaatcgcccagcggcgtggccagagcctcgcgcaactggccttggcctggacgttgcgtgacccacgggtgaccagtgcgctgatcggtgcgagccggccggagcagattatcgagaacgttggtgcgttgaagaacttgagcttcagcgcggaagaactggcggagattgatcggtttgcgcaggaaggcgggatcaacttgtgggaaaagccatccactgctgaataactggtcattacttggccattgtgggagggggcttgcccccgatgggggtgggtcaatcactgattagttggccgacaatctgctatcgggggcaagccccctcccacactttgattttcagtgttgctgagatcgtgtgggcctagaacggcacatcccccaaaatcgtcgcccggtgcatcacccgccgctgcggccggtaatcatccaccgcgtagtgctgcgtcacgcggttatcccagaacgccacatcgttttcctgccagcgccagcgaatggtgaactccgggcgtgtcgcgtgggcgaacaagagcttcaagatcgcctcgctctccgccggttcaagctcgttgatcttggtggtaaatccatcactcacgaacagcgactcgcgcccacttaccggatgcgtacgcaccaccgggtgcgataacggcgggttcttcctgcgggtttcttcccagcgtgccaggtcttcggcggtgttgccaaagcgctccagcgggaaggacttggtgaagtcatgggtcgccgtcagcccgtcgagcaagcgcttgaacggtgcggacaacgcttcataggccgcaatcccgctggcccacagcgtatcgccaccaaacgccggcagcagcttggcgctgagcaccacgccgagcgccggtgtcggcaggaaggtcacgtcggtgtgccacacggcgttgtcgcgcacgtcggtgacggcggtgtcgaggatcagcacttcgggctggtccggcacgttggggtagatcgggtgaatatgcaggtcaccgaaatgcgccgcgaaccgtgcttgctgttggggggtgattggttgatcacggaagaacagcaccgagtgctggagcaacgcctgttcgatggcatcgcgctcttcaatgttcaacggctgggtgatatcgacgccactgatcagggcacccaatgcggtgctaatgggggtaacggtcaggctgctcatgctgttctcactcaatgtgcctggccatgccacggcaccagtttacgctgcagggcacgcaggcccatttccatggcgaaggcgatcagggcgatcactagaatccccagcaccaccacatcggtgaccaggaactgcgccgccgactgcaccatgaagcccaggccgctggtggccgcgatcaattctgcggcgaccaatgtcgaccaacccacacccagcccgatgcgcacgccggtgaggatgtcgggcagtgcgctcggcaggatcacatgccgaatcaactgggcacgggtggcgcccaacgactgcgccgcccgcagtttggccgggtcgacggtgcgcacgccggtggcggtggcgatggcaatcggcgcaaaaatcgccaggtagatcagcagcaccttggacagctcgccgatgccgcaccagatcacgatcagcggcaggtaggccagcggcgggatcggccggtaaaactcgatcagcgggtcgaggatgccacgggcgattcggttggaaccgatggcgatccccaccggcacggcggtcagcacggcaaagcccaggcccaggccgatacggctgaggctcgcgcccaggtgctgccacaaggtggaatccatatagccgctggtcgccagcagccagcccttttgcagcacggcggacggcggtggcaggaacagcggctcgatcaagccgctggccgtcacggcccaccagagggctagcaacgcgaccagggtcagcaggctgatccagcgcgtgctcaggctgcggcgtaccgggaccactgcgtgcgccaccggtttggtcaccgtggcgggaagttcgtagctgctcatgcggacacctggcgttgagagaacactttgcccagcacgtgttcgcgggtttcgataaagcgtgggtcggacttgatcgcccgcgccgattcaccggcggcgtagcgttggccgaagtccaagtgcaggcgttcgacgatctggccggggttgggcgccaacaggatcaggtcggtggcgaggaacaccgcttcttcgatgtcgtgggtaatcaggaataccggcttggccgtgcgccgccagacctgcagcagcaattcctgcatctgttcgcgggtgaaggcatcaagggcgccgaagggctcgtccatcagcagcacacgagggtcggccgccagggcgcgggccagcccgacgcgttgcttctggccgccggaaagctgccagatacggcggctgtcgaaaccggcgaggtccaccagcgcgagcatttcccgggcgcggacttcgcgttgcgccttgggcacgccagccagctccaggccgaagccgacattggccagcacgtcttgccaaggcagcagggcgtcgtcctggaacaccacgccgcgttcagcactggggcctttgaccggcacgccatcgagggtgatgcgcccggcgcaaggttcgacgaaaccggcaatcaggttcaacagcgaagtcttgccactgccggacgggccgagagccaccagcaactgctggggccccaggtcgagtgaaatatctgacagtaccggttctgtggcgcctgggtactgtgcgctgatgcgctccagctgtagcaaggccatcgcgatgaactcccgatcaattggtgatgaatttggcgctgacgtaaggggtgtagtccggcagtaccgcgtcgaccttgccttgttccttgaggaacgcggcggtgtcggtcacggctttggtggtcggtgcgcccagcaggctcacctggtcagcggccagcgggtagacgttgccttgcagcaaaagcggaatatcgctggccttggcaccggagagtttcaccagtttgttgacgttgcttttatcggcgagccaggcttgtgggtctttgcggtaggcggcgtaggcatccagggtgaccttggcgaacgcggtgacgatttccgggtgcttctcggcgaagtccttgcgcacgatccaggcatcgaaggttggtgcgccgaacttggccaactcgccggaggtgatcagcaccttgccgttctctttggcgacgcccagtgctgggtcccatacgtaggtggcgtcgatgtcaccacgcttccaggcggcgatgatggccggtggcgcgaggttgaggatggtcactttggacgggtcgatgttccagtgcttcagggcggccagcaggctgtagtgcccggtggacacgaagggcacagcgactttcttgccgaccaggtcctgcgggctgttgatacccgaaccgttgcgcgccaccagggcttcggcgccgccgatctgggtggccaccaggaaggtttccaccggtactttgcgggtgatcgcggcggtcagcgggctggaaccgaggtagccgatctgcacgtcacctgaagcgatggcggcgatgatgtcggcgccattgtcgaatttgcgccagttgatcttcgcgttagtggctttttcataggcgccatcggcttgggcgactttggccgggtccacggtggtctggtaagcgatggtcacgtccgccgcctgggcaaacaggctggcaccggccagggacaatgcggccagcaggcgcaaaggggttaacagtttcaaggggaagctcctcaatcaggcggccgagggtcggcgtgtgaggagactaaatgatctaagaatccgaaaataaataacattttcgaattagcttatgagaagagttgtgagcgctgaccttcaatcgggtggaagtcaaatgtgggagggggcttgcccccgatagcagcgtgtcagccactgtataggtagctgacccacgccatcgggggcaagccccctcccacatttgccccgatttcagcttacttagttgctgatggcgaggatgctggcttggtacgagccgacaaacacgtcaaagtcgcccacttcgttttgctccagctcggcttgctgtgccagtgaggcacgcgcgagttcttcaaaacgcgcctgctcttcagccgccagcggctccttgcggaaatgctcggcgtgcagctggctctgatgcagggagaattgcgcaaagctctctttacgctcggccatcgccgccagcacctgggccgacggggtcagggacgaatcgttgaccttggccaactgggcgtccagcgcctggctgtgctcggtgatgccgtggctctcatccagcaaggcagccagtggcgcaatctgttcgagcagctcggcggcccattccttcatgtccaccggctggccctggcgttgcagttgcaggcccggacggcgaccttccttgaccacgctgaggaagttggaggtggcgttgccgcactcgttgttggcgaacagcgggctgtcgttcagtgcgcagaacagcaggaaggcgtcgaggaagcgcgactcttgcaagtcgatacccatgggcaggaacgggttgatatccaggcagcgtacttcgatgtactggatgccacgggccatcagcgcctggatcggccgctcgccggtgtaggtcacgcgcttggggcggatgttggagtagtactcgttttcgatctgcaggatgttggtgttgagctgtacccactcaccatccttgtgcgtgccgatttcgacgtagggcgcgtagggcgttgccaccgcttcgcgcaggctgtcggtgtagctggccaggtcgttgtagcacggcgtgaggccggcctgggcattgctctggtaacccaggtcactcatgcgcaggctggtggcgtagggcaggtacagggtatcggcgtcgagcgcttccaactggtgcgaacgaccacgcaggaacccggcgtccagggccggcgaagcaccgaacaggtacatcaacagccagctgtagcggcggaaattgcggatcagcgcgatataggcgttggactggtagtcgcggtcagtgccgacaaacccttcggtttccttgagcaacggccacagcgcctcgggcaacgagaagttgtagtggatcccggcgatgcactgcatggtcttgccgtaacgcagggccaggcctttgcgatacacgtacttgagctgtccgatattggaggtgccgtagtaggcaatcgggatgtcttcctcggccggcaacgggcacggcatcgaggggctccacaggtattcgctgccgagcttggtgtaggcaaagcgatggatcttgtccaggctgctcagggtatcggccgggttgggcagggcaggagtgatgaactccagcagcgattccgagtagtcggtggtgatctgttcgtgggtcaacgcagcgcccagggcttcggggtgcggcgtttgcgccagtcgaccctcaccggtgacacgcaggcattcgcgctcgatgccgtgcaagcactgctctagcagggagaggtgttcgcgcttgccgagcagggccaggcggcggttgagaagttcgctcaagttggattccttcacgcgtcagtcgccccaatatgggggtgggcaggacggtctacaagggtgaagttgaaactggcgtgatcgcctggttttgagtcgatttgacccgctctgaatatgccgacttcactccatgaatttggctacagcgcagcgagaaaattccgacgccgttagtgcagcgccgaaattaactcaaatcgggggtggggagctataggacagcgaaggtgccctgtgcttttgcgacaagtctttcgtcctgatacacctccgcctcgaccaccagcgtacggcggccggcatgaatcacccggctggtacacagcacgtcaccgtccgacacggcgcggatgtaattgatcttgcactcgatggtcgcgctctgctggtcgaaaccatgggagctggagcaggccagtcccatcgtaatgtccaccaggctgaaaatcgccccaccatggagcttgcccgcgcggttgcgcagttgcggctccagggtcagggccacctcggcaacgccttcttcaaggcgttgcaggcggcagccgatcagttcgctgaaggcgctctgggtcaagccggccgggatttccatcaacgtttcttcagctgtttggcgttggcgaacagcgaagccatggcgttgttgcttggcgctgtggtggcggtttccttgcgcggtgcattgttttcagagcgattctgcgactggcgcggtgccgagcctgggcgtgcgccacgggcaccgtcgattttctcccctggggtgtcgctcatgcgcatcgacaggccgacgcgtttgcgcgggatgtcgacttccatgaccttgaccttgaccacgtcaccggctttgaccgcttcgcggggatccttgatgaatttctccgaaagcgcggagatgtgcaccaaaccgtcctgatgcacgccgatgtccacaaaggcgccgaagttggtcacgttagtcaccacgccttcgaggatcatgcccggttgcaggtccttgaggtcttcgacaccgtcctggaactcggcggtcttgaactcgggacgtgggtcgcggcccggtttttccagctcttgcaggatgtcggtgatggtcggtacgccgaaggtttcgtcggtgtacttcttgggatccaggcgcttgaggaaagcggcgtcgccgatcagcgaacggatatcgcggtcggtctcggcagcgatgcgttgcaccagcgggtaggcttccgggtggaccgcagacgcatcaagcgggttgtcgccattcatgacgcgcaggaagccggcggcctgttcgaaggttttttcacccaggcgtgcgacttttttcagcgcggcgcgggttttgaacgcgccgttttcgtcacggtgactgacgatgttctgcgccagggtggcattgaggccggagattcgcgccagcagtgccacggaggcagtgttcacgtccacgcccacggcgtttacgcagtcttccaccaccgcatccaggccgcgcgccagtttcagctgcgacacgtcgtgctggtactggccgacaccgatggatttagggtcgattttcaccagctcggccaacgggtcctgcagtcgacgggcgatggataccgcgccacggatcgacacgtcgaggtccgggaattccttggacgccagttccgacgccgagtacaccgaagcgccggcttcggaaaccatgaccttggtcatcttcatggctgggtattttttgatcagttcggcggccagcttgtcggtttcgcggctggcggtgccgttgccgatggcgatcaggtccaccgcgtgcttggcgcacagggcggccaggatcgccagggtctggtcccacttgttgtgcggcacatgcggatacaccgtggcgtggtccagcagtttgccggtggcgtcgaccacggcgaccttgcagccggtacgcaggcccgggtcgaggcccagggtcgcgcgcgggccggccggggcggccagcagcaggtcgtgcaggttgtgggcgaacacgttgatcgcctcggtttcggcgccgtcgcgcaattcgccgagcaggtcggtttccaggtgggtgtagagcttgaccttccaggtccagcgcaccacttcgccgagccacttgtccgcaggacggttctgattctggatgccgaattgttgaccgatcatgccctcgcacgggtgcatggtgcctggcaattcgtcgccgaccttcagcgcggagctgagaatgccttcgttgcggccacggaaaatcgccagcgcgcggtgggacggcatgcttttcagcggctcgtcgtgttcgaagtaatcgcggaacttggcgccttcttcctctttgccggcgatgacgcgggcgctgaggatggcttcctgcttcaggtagctgcgcagtttttcgagcaggctggcgtcttcggcaaagcgctccatgaggatgtacttggcgccttcgagggcggccttgacgtcggcgacgcctttttctgcatcaatgaagcgggcggcttcaacttccggggccagcgacgggtcgttgaacagaccgtcggccagctcgcccaggccggcttccagggcgatctggcccttggtgcgacgcttctgtttgtacggcaggtagaggtcttcgaggcgggtcttggtgtcggcgagcttgatgtcgcgctcgagttgtggggtcaacttgccctgttcctcgatgctggcgaggatgctgatgcgccgttcgtcgagttctcgcaggtagcgcaggcgctcttccaggtgacgcagttgggtgtcgtcgaggctgccggtcacttctttacggtaacgggcgatgaagggcaccgtggagccttcatccagtagagcgacggccgcttcgacctgttgtgggcgtacaccgagttcctcggcgatgcggctgttgatgctgtccataaaaccacctgaaattctgaaaagcagctcgcaggcccggaaaacaaggccctgggaggctggttgagcggcccgactggcgccgctgcctgggtcaagaggcagcctattgaccctcgaaatcgaaaaattcgcgacaagcgggtgaaaaaagcctcggcagcaaacggtaacgatctgacgttgccctgcacggcggcggcgcattataaccagcgttctgtccttgggggggattgcgccaacggttgtagggcgcgggttcgctggcggtagaggaaaaatctgctaacaatgcacacggtgcgtataacggcagctaggccataatgcgcgccgagataagaggagcatccaatgagcagcactgcacaaactgctgaaggcgaaaaaattctcatcgttgatgacgatccggggctgagcagcctgctggagcgtttcttcaactccaagggctaccgtgcccgcgcggtgccgaataccgagcagatggaccgcctgctggggcgcgaagtgttcaacctggtcgtactcgacctcatgctgcccggtgaagacggcctgaccgcctgcaagcgcctgcgcggcgcgaacaaccagattccaatcatcatgctcaccgccaagggcgatgagctgagccgtatcaagggcctggaactgggcgctgatgactacctggccaaacccttcaaccctgatgagctgatggcacgggtcaaggccgtattgcgtcgccaggccccgccggtaccgggcgcaccgggcagcgaagacgaaagtgtcacctttggcgactacgaactgtcgctggcgacccgtgagctcaagcgtggcgatgaagtgcacatgctcaccaccggcgaattcgccgtgctcaaggccctggtgatgaacgctcgccagccgctgacccgcgacaagttgatgaacctggcccgtggccgggaatgggatgccctggagcgttccatcgacgtgcagatctcccgtctgcgtcggatgatcgagccggacccgtccaagccacggtatatccagacggtgtggggcgtaggttatgtgtttgtgccggatggcaacaaaaccagttgaccgatgatttgcagttacgggcctcccggtgtctgactccatgagggtcgacgggatgcccggcgtctgcaattctgcgagcgccgctcgtttctgcaaggtatccagctgtcttctatgaaaaccccgttgtggttcccccaaagtttcttctcccgcaccctctggctggtgctgatcgtcgttctgttttccaaggcactcacgctggtttatctgttgatgaacgaggacgtgctggtggatcgacaatacagtcacggcgtagccctgacgttgcgtgcctattgggccgctgaccccgagaatcgcgagaaaatcgccaaggccgccactctggtgcgtgtggcgggcgcgggtgtgccggaaggcgagcagcattggccctacagtgagatctaccagcgccagatgcaggccgagctgggtgaagacaccgaggtgcggttgcgcatgcatgtatcgccggcattgtgggtgcgtgcgccgagcctgggcgaggactggttgaaagtgccgttgtatccgcatccgctgcgcgggcagaaaatctggaacgtgctgggctggttcctggcgatcgggctgctttcaacggcgtcggcgtggatctttgtgcgtcagctcaaccagccgctcaagcgtcttgtgtttgccgcccgccaattgggtcagggacgcagtgtgcgcctgccagtcagcgatacgcccagcgaaatgaccgaggtgtatggcgcgttcaaccagatggcggaagacgtcgaacaggctgggcgcgagcgcgagctgatgctggcgggggtgtcccacgacttgcgcacaccgttgacgcgattgcgcctgtcgctggagttgatgggcaaccatacggatctcaccgatgacatggtccgcgacattgaggacatggacgcgattcttgaccagttcctggcgtttatccgcgatggccgtgatgaggtggtggaggaagtcgacctgacggacctggtgcgtgaggtggtcgctccctataaccagaacggcgaacaggtgcgcatgcgtctggagccgatccagccgtttgcgttgcgtcgagtgtcgatgaagcgcctgttgaacaacctgattggcaacgccttgcaccacgccggttccgatgtggaagtggcggcgtatgtgtctggcgacagtgcagcgccctatgtggtgctgagcgtgatggaccggggggcaggcatcgacccggatgagttggaaggcatcttcaaccccttcacccgtggcgaccgtgcccggggtggcaagggcactggccttgggttggcgattgtgcggcggattgcctcgatgcatgggggcaatgttgagttgcgcaaccgcgaagagggtggcctggaggcgcgggtgcgcttgccgcttgggctgatgttgcctcgcgacgcggtctaagcaccgacacaggtcaaatgtgggagcgggcttgcccgcgaatgcagggggtcagtcgatacatatttgactgatccaccgctttcgcgagcaagcccgctcccacactggtttgtggcggttgatcagcccttgcccttggtcctggtcatattcggcccaccattcttctccagatgctgaatgatgatccccgccacatccttcccggtggtggtctcaatgccttccaagcccggcgacgaattcacctccatcaccagtggcccatggttggagcgcaagatatccacacccgccacggccaaccccatgaccttggccgcccgcagtgcggtcatgcgttcttccggggtaatcttgatcaggctggcgctaccgccacggtgcaggtttgagcggaactcccccggcttggcttggcgcttcatcgccgcaatcaccttgtcgcccaccacgaagcagcggatatccgcaccaccagcctccttgatgtattcctgcaccatgatgttctgcttgaggcccatgaacgcctcgatcacggattcggccgccgtcgcggtttcacacagcaccacgccgataccctgggtgccttccagcactttgatcaccagcggcgcgccattgaccatgtcgatcaggtcagggatgtcgtcgggggagtgggcgaagccagtcaccggtaggccgatacctcggcgcgacagcagctgcagggagcgcagcttatcccgcgagcgggcaatggctaccgattcgttgaggggaaacacccccatcatttcaaactggcgtaacaccgcgcagccataaaacgtcaccgaagcgccaatacgcgggatgacggcatcaaacccctccagcggcttgccccggtagtggatctgcggcttgtggctggcgatgttcatataggcacgcaacgtgtcgatcaccaccatttcgtggccacgttcggtgccggcctcaaccaggcggcgggtggaatacagacgcgggtttcgcgacagcacagcaatcttcatgcagcacctgggacagatagggtagagaccgggaacaccggcttgtcttgaacgtacttgataccgggattgaccaccaattggccgtcaatcaaggctttggagcccagcaacaggcggtaacgcatggctttgcggcaggccagggtaaattccacccgccatacccgatcacccagcgccaacgtggtgctgatgacatagcgcacctgcgcatggccattggagctcttgatggttttcatcgtcaccaggggcgcttcgcagcggcggtgacgcaattgcacgacgctgcccaagtgcgcggtaaaacgcacccactgctcgccgtcgcgctcaaacggctcaatgtcggtggcgtgcagacttgaggtgctggcaccggtgtcgatcttcgcgcgcaggcctgccactcccagatcgggaagtgccacccactcacgcagacccacaacggtcaaatggtcaaatgtcttcaatatggataaccgatcaattcgcccaggcctgaggggatacctcggccagggctttaaatgcaggcttggcgaaccagtagccttgcatcagaaatattccgcagtcggagagaaagtcccgttcgccggcactttcgatgccttcggcgatgacagtaacccccaactgctcacagattgtgacaatcccctggacgatgacctgacgaacacgatcctgatcaacatcgcggatcagcgccatgtcgagtttgatcaggtcaggttggaaatcagccagcaggttcagccccgaatagcccgcgccgaaatcgtcgatggcggtcttgaagccgaattcgcggtattcacgcagaatattcgtcaaatggcgatagttatctacatgctcgctttccagggtttcgaaaatcagccggttcaacggaaaattatgtgcgcgagccgcctccagggtgctacggatgcacagttccgggcggtacacggcattgggcatgaagttgatcgaaaggtgcgtttgcatgcccaaggtcgccgcaccggcgatcgcctgggttcggcagcgttggtcgaagcggtagcggttgctttcgttgacttggtccagcaccgacagcgccccttcgccttgtgtgccacgcaccagggcttcgtgggcaaagatcgaatggtcccgcaggtctacgataggctggtaagcgaacgcaaaatcgaacccgaggagctcgctttgctggcaacccacacagcgctggttgggcgaggtgagtgaaaggggaaattcggtcacagcatacctcgcgaaaacagggtgctacctggcgtatcttaggtgagccttggggtttatgcgtcgaagggtttcaacggtaaagttgcgacatttttcagagcgaggaattcaagtggctcaaaagcaggaagaggaagaaaaggtccgtctggacaagtggctgtgggcggcgcgtttctataaaacccgtgccctggccaaggccgccatcgagagcggcaaggtgcatcatcgtggcgagcgctgcaagccgggcaaagagccacgtgtcggtgatgagtttcagattcgtgcagggtttgatgaaaagacggtcgtggttcaggcgctttccatcgttcggcgtggcgcacccgaagcgcaagcgttatacgccgaaaccgaagccagcatcgccaagcgtgaaaacgcggcggcgatgcgcaaggccggcgccacgggcatgaccaccgatggcaaaccgagcaagaaacaacgccgcgacctgttcaagtttcgcggcagtggcaacgatgactagcctcaatcgaacgggcctttgtggcgatcgggcttgctgtggtgagcgggcttgccccgcgctggagtgcgcagcgctcccgttttttggagccgctccgcagcccagcgcgagcaagctcgctcactacaaattattgcgcaggcctgacaacgctcattcgccccactatgggtaaacgagcagccagcccaaacaccggcgccgtcacccgcaacaacccactcgataccgtcgccgcaaacggtgtgtagtatccccagcccagcgccaacagcgccagcaacacaccgccgatgtaatcgtcctgcccccaatgcgcccccgccaccaggcgcggcatcatgaacagcagcgccaggccccagatcaccagcacctggcccgcgcgcttggcgaacacggtcatgaacatcccccaaatcagcagcaccgaggcgtggtccccggggaagctctggctcgaacggtccttcaactcccaggtcttctccaggcctgggaagtagtcactcatctggatcgccccgctgatcaccatggacgggctatggtgttgccagcccatgtgcgcagcgagtttggaaaacagcatgcggataaacagcaacagcaacagaatgccgacaaaacctaacaaagcctggcgcacctgcaccgccttgaacacccaatcgccgcgaatcaacagcgtcagcagaatcaccccgaccaccgcatcgaacggtcgcaaactcgctacagcccacacgtgcagccatgcggagttgctcgccagcgggtcgttgagcaggtgaaacagccactcgtcgaacatcacacacagcatctggcccgtgggccacagccaaaaacacagcaacccgacagcgagtagattgcaaacggcccatcgcccgaggttccacttggcttggaacaaacccggattgttcataaactgtcccccacggcttcagaaaactgcaccaaaacggtgctaaagcgtttaattctataaaccttgtaatcaatttgtcatcaattcagatacccagacctatgactgatctaccggataccgacttcacccaacgcttcatcttcgacgagagcgacgcccgcggcgagctggtctcgctggagcgcagctatgccgaagtcctcgccaagcacccctatccggagccggtcgcgcaactgctcggtgaactgatggcagcggcagcgttgctggtgggcaccatgaagttcgatggtttgctgattctgcaggcgcgctccgaaggcccggtgccgatgctgatgatcgaatgctccagcgagcgtgaaatccgtggcttggcccgttatgaagccgaccagattgcgccggatgccaccttgtccgacctgatggccaacggcgtgctggcaattaccgtcgatccgaccgaaggccagcgctaccagggcattgtcgatctggatggcgaaaccctgtcggactgcttcaccaactatttcgtgatgtcccagcaggtgggcaccaagttctggcttaacgccgatggcaagcgcgcccgcggcatgctgttgcagcaactgccgcccgaccgcatcaaggacgaggatgagcgcaccgacagctggcgcaagctgaccgccctggccggcaccctcaccgctgaagagcaactgggcctggataacgaaaccatcctgcaccgcctgtaccacgaagaggccgtgcgactgtttgacgcacagggcctgcgcttcaattgcagttgctcgcgtgagcgttcggccaatgcgctggtcagcctgggcctggaagatgcgcaaaacctggtggttgagcacggcggccatatcgagatcgactgccagttctgcaacgagcgctacctgttcgatgcggccgatgtagcgcaattgttcgccggcgcaggcatcgacacgccttccgacacccgccactaaaacgtttaagcacaggtaaatcacctgacaaacgccggattagcgcagttctgacgggagggccctactctttttgggcttttctggcataatccggcccacttttttcgcggtagtagtgcgcaactttctactacaaaacgtttggagcactcggccataggccgacggggaacctcatgacgcaagccaacaacgccgtatacaccgatctgagtgttgacgatctggttaaagaagccctgcagcgtggtgaaggcgtgctcgccgatactggcgcgctggtcgtcgaaaccggtcaccgtactggccgttcgccggtcgaccgtttcatcgttgaagagccttccacccaggcttccatcgcctggggcccgatcaaccgcaagttcccggccgacaagttcgatgcgctgtgggctcgcgtcgaggcattcaacaacgcgcaagagcatttcgtttcccacgttcacgtaggggctgccgaagaccactacctggctgtgaaaatgaccacccagacggcctggcagaacctgttcggtcggtgcctgttcatcaacccggcccagtacaacccggccggtcgtgaagagtggcaagtgctcaacgtggccaacttcgaatgcgtgccagagcgtgacggcaccaactccgacggttgcgtgatcctcaatttcgcccagaaaaaagtcctgatcgccggcatgcgctacgccggtgaaatgaaaaaagccatgttctcggtgcagaacttcctgctgccggcttccgacgtactgccgatgcactgcgccgccaacattggcgaagcaggcgacgtgaccctgttcttcggtctgtcgggcaccggcaagaccaccctgtccgccgacgaaagccgttacctgatcggtgacgacgaacacggctggggcgaaggcgtggtgttcaacatcgaaggtggttgctatgccaagtgcatcgacctgtccgagaagaacgagccggtcatctggaaagccatcaagcacggcgccgtgctggaaaacgtggtgatcgacgacgccaagcacgccgactacaccaacgtcagcctgacccagaacagccgcgccgcctacccgctggagcacgttgccaagcgttccgagaagaacctgggcggcgagccaaacgcggtgatcttcctgacctgcgacctgaccggcgtactgccaccggtgtcgatcctcagcgaagaacaggcggcctaccacttcctgtccggctacaccgcactggtgggctcgaccgaaatgggttccggtggcggcatcaagtcgaccttctccacctgcttcggcgcaccgttcttcccgcgcccggctggcgaatacgctgaactgctgatcaagcgtatccgtggcttcggctccaaggtctacctggtcaacaccggctggaccggcggcggctacggcgtcggtaagcgcttcaacatcccgaccactcgcggcgtgattgcagcgatccagagcggcgcgttggtcggtgctgaaaccgagcacctcgacaccatcaacctcgacgtgccattggccgtaccgggcgttgaaaccggcctgttgaacccacgtaacacctgggccgacaaggctgcctacgacgaagcggcgaaggcgctggccggtctgttcatcgagaacttcaagaagtttgaagtgagcgatgcgatcaaggcggcaggtcccaagttgtaagattcagtcgttgtgaaaaagccgcctcttgtagggcggcttttttgtgcgcggtgtcttagtcggcaatatgtaaaaccaccgcgccgaccagtaccagcacaacgcccagtacctgcaccgccgacaaccgctccttgaaaaatacgaaccccaggatcgccgcgatcccgcctgataacgtactgatcaccgtcaccaccgacaccgaacccgccattgccccccacgaaaacgccgagaacccgccgaggttcatcaggcttgccccggtcagcgtcgcacagtttttcagcgctgggattttcaggccgtccttgatcttcaacaccatcaccaccagcacgcacaatccaaccatgtaacccagccacaacatggtgatcggccccagcgccggcagtgtgtagcggccttgcagccagaagctggtgccatacagcaaggcggcaagcatggcgtaggcgatggacaggcgtggactgttatggggggtgccgttgtccttgtgaatgctggagaagatcacgccgatcacacacagggcgatacagcccagttgcgtcaggctgatgtgttcaccgctggcccaggacagcaaggtggtcaccacgccgtaggaggtcaccagcggcgccacgatggcggctttgcccagggcgaaggccttggacagcgccagggcgccggagacggtgaacagggcggcagcgatgcccagcagccagacgctgagcgcggcgtcgagggctttgaacaggaaggtcgggaggatggccaacagcagggtcatgatcaggaagcccagcgcctggccgaaatacaccgcgcgttttacgcccacggcacgggcgttgaggcccacgagaaaatccgtgccgccccacagcagggcggccagcaggcccatagttacgtccatgtaaggtccttgttgttttgagcacgctcatcgaatgtgggagggggcttgcctccgaaagctgtttatcagcctgtatatctgtgcctgacacaccgctatcgggggcaagccccctcccacatttgagtgccagtgtgcctggaatttgtgttcgctcagctcaggttttccagcgtctgcgtgtcccagctgtgagtcttgatcgccaggtagagcatgccgatggtcagcggcactttttcgccgcgccccttggcccgacgcttgagaaatacatcaaacaccggagggttgaagtaacgataagtgtcgtagtcacccaggtcgagcgcaaattcctgctccagcgcttccatcagttgcttggcctcactgccgtcacagcccaggtcgaagttgatcgaagtttgcaggcggatcgtcttgtgttttggcaggccgatttcttcgtgcaaaagctgcaggagttgctgcatgacggggtcttcggggaagttgggggcgaggttcatggtgggggcacgcaggagtgggtgatcggcttttactttgcaatagatattctgagtgctcaataacccgatgcctgtcacgaaggcgattattggcaggctcccaagctgtgcacctctgatccatgaggtggcatacaacagaagtattgggccggttaccaggaggcagagtccaaaccatcttctgagcactggcagctttattgtcctgtcaattatggcggccagtgcgatgaggaggagcagataaatccattcgatgtattcgttcatcgtcttagccactctggagctgttgagccgtagccaatatgttgagtcctttcaatgttcacttgtatttgccggggctgctgaaagggcgccagtttcagtcagagaaaggtgagttttatagaggggtgggcaggagttttaagcagtttcagaaggggatgtcgtggtatttggaggtttcttacagggctttccgggatttgtggcttgcagtgacttaacagtaaaacaggcaagtgatgtgagggggggtgggatgtgtcagttgccgaccggcctactcacacaccgctcaaaaatcgcctccaacccccgataatcacaggccaccgcatcaatattcgcgggtatccacgccgcgtgtttcaccagccaccagttcacggaaaacccggcattcacgatgatctgctcgaacaaaatccgttgcgcccggccgttgccttcacggaaggggtggatgacgttgaggtcgccataggcttcggcaatctgcgtcaccagctcggcctggctcgccccgacataccagttcgctgcctccatttgccggatgattttcgccgcttccggcgggatgcgttccggggtgcagaacagggtgtcgcctttctggatgttgacgctgcgcagttcgccggcccaatcgtagaggtcgctgaacaggatgcggtggatgtgttgcaggcgttcgaggtcgtagggcggagggaagagggggaggttgcctacggcgatttcggataattcccgctcggcctggtgcagccggggttcatcgagcaaaccgaggcggttgcgcaggacgctgctaccgggatagcagtacgggtcctggcccaccccatatttgtcgagcatcagcgtggggtgttgcggtacttggcaaggacggcttcgcgggtcggcagtggtttgtcgacgtcggccggttgggtgtcgaacccttccaggcgcaggctggccaggtaattggaacggcggatcttgtggtaatgatcctgtttttgctcaaacgtcggttcgctcatggcagcgtactcctgggtagcaaggcttgattgtagcgcaatgcgtcaacgggcaggcgggataaaaaccacgtcacattctgtataaataatcctccagtgggcgcatttaagagtatgtttcaccgcaaaatcttgcagggcgattccgcccgctacttaaagggagttaagcatgggtttgctgcgtgttgcttcggcgatgtcattgtgtgcggtcgcgttttcagtccaggcggcgcaattgccgattgaagtgctcagtgcggtggtcaaggaccagaagatcgcggatgccgaggtgttgctgcaacgcaacggtgcgcagaacgtagtgggccgcaccaacgcccagggccaggtgaccctcaccagcgaagccgcagatgacgccaccaatcttctgatcatcaagaagcctggctactcgaacctggtggtgaagtgcccgtgcgccggcatgacgtatgccatcagcccggtgatggaaaacctcgacggcctgcgtgtggtgttgacctggggcaagaccccggaagacctcgactcccacatgatcttcccgggcaacaatatctatttcgagaacaagacgggcaccgacgccgaactggacgtggatgacgtcgacagctacggcccggaaaccatcaccctgcagaaaaaacactacggcgaaagctacgtgtatgccgtgcatgacttcaccaacggcggcaatcccggttcgcgccagctgtccaacagcgaagccaaggtgttcgtgtacatgggccaatcgctggtacgcacctactacgtgccgaaaaaccgcagcggcaacctgtggaccgtgttccgcatgaccggcagcggcgactttcaggacatcaacaccttcagtggcgtgacggtgaacgcggcgaatgtactcaacgaagtcaaaccgttgctggatgacagcgtggctgttaccgccgttgcggtcagctcttctgcacaagccgatgcgaagcgtctgaacgtgcaaggtgaagcggcctaccaggccgccaagctggaccaggccatcgatctcttccgccaggctatcgagctggacaacggtttcggcaaggcctacggcaacctgggcctggcgtatcagaaggccggcaacaccgccgagtcgatctgggccaaccgcaaggctatcgccctggcaaccggcgcgaacgctgcgacggtgcgagcgggcgcctactacaacattgcgcggatctacgaagcggcggggcagttcccggatgcgttgcgtcactatcagttggctaaggagcagaaggccaacccggtgtatgacacggcgatcgagcgggtgcagaaccgctgattcagccctgatacagaactaaattgtgggagggggcaggtcctctcccacatcgggtttgtatccttcctgttcctccctcggattattcccacttcggccctaggccatccttcgccctgtgtatcatcctgtctcttttttccatgcgacctttctcgattcgccgagattcccaggctatgtttttgagccaactcagcggtcaatggagtgacagcctatgcacgacaccctccaacaggtctttggttatccacagtttcgcctgggccaggaagaaacggtcagcgccatattggcggggcgttcggcggccgctattttccctaccgggtcgggcaagtccctgtgttaccagctgtcggcggtgctgctgccgcacctgacgctggtggtgtcgccattgttggcgttgatgcaggaccagctgggtttcctgcagcgccatggcatttcggcgggcagtatcgactcggcccagagccgcgatgaggccaatgaggtcatggcccgtgcgcggtcgggggagctcaagatcctgatgatttcggtggagcgcttgaagaacgagcgcttccgtaacttcctgcaaagcgtgcggatctcgttgttggtggtggacgaggcccactgtatttccgaatggggccacaacttccgtccggactacctgaagctgccggactaccagcgccagttcaatatcccacaagcactgctgctgacggctacagccacgcccaaggtaatcgcggacatgcaggcgaagttcgccattgcctcggacgatgtagtcaccacgggcttttaccggcccaacctcaacctgctggtggaaccggtcagtggtgcggacaagcgtcgccggctggtgcagtggatgaatgagcgcgtcggccagccgagcattgtttacgttaccttgcagaaaaccgccgagcagattgccgagcacctcaatcgcaacggcatccaggccgaggcctatcacgcggggctgccccacgataaacgcgagggcatccagcagcgcttcatgggtggacgctccaattgcatcgtcgccaccatcgcgtttggcatgggcatcgacaagagtgatatccgcaacgtggtgcacttcgacttgcccaagtccatcgagaactacagccaggagatcggccgggcagggcgtgatgggcagccatctgattgcctggtgctggccaatcgcgacagtctcaacgtgctggaaaacttcgtgtacggcgatacgccggagcaggaaggaatccagcgggtgctggaagagttgcaggccgcgcggggcgatggacagtgggaattcttgctcaggtcgttgtcggaccacagcaacatccgcgagctcccattgaagacgctgctggtgcagttggagctcaagggcgtgatcgcgccgcgctacgcgttttatgccgagtaccgtttcaaatatctggtcgagcctgaggttctgctggcgcgattttccggtgagaggcagcagtttgttgcagcgatcatccaggtgtgcaaacgggcgaagacctgggctacggtggatttcgatgcactgtatcaacagcacaatgccgagcgcggacgggtggtgaaggcgctggattacttccaggagcagggcctgatcgagctggaaagcaagcagatgactgaggtctacagcctgctggagaccgatttcgatccacaggtattgagcgctgagttatacacaggcttcaagcagcacgaggtgggagaagtcgcgcggattcacgcgatgctcgatctgttcgccaccgaatactgcctggggcagagactggcgaagtattttggcgatgaaaacgcgccgcagcgctgtgggcattgctcagtgtgccatggccatgttgcgcatctaccgccgccgccgggcttgccgccacttgtggataagaacttcatggggctgtgcggtgattttatccacaggcatcatgaacacaccggccaactgccaggggcggaacgcctgacgcgtttcttggggggcatcagcgtgccgctgttcaccaggttgaaggcgcggggtattccgggttttgccgtgctggaagactatccgtatgccgaggtgcgcgaatgggcccaggcccatttgaatgatctgtaactcactttcacgagatgacccgatgcctgacaccgtaccgcaacgcgccgattaccctcacttccagccgatcatcacgcgctggcacgacaacgatgtgtatggccatgtgaacaacgtgacctactacagcttctttgacacggcagtgaatacctacctgatcgagcaaggtggtttggatattcatgacggcgacgtggtggggtttgtggtgagttcggcgtgcgactattttgcgtcgatcgcctttcccgagcgcatctacatcggcttgcgggtaggcaagttgggcaacagctcagtgcagtacgagttggcggtgttcaaggcgggcgaagaagacgcctgtgcggcggggcggtttgtgcatgtgtttgtggatcgcgggtcgaaccagccggtgacgattccagcgcggttgcgcgaggcgttgcagcggttgatcacgctgtaggagccggcaagccggctccatattcagcaacaatcagtcgcggtagtggtgcttgttcttgcgatggccataggcatgaccgcgcccacgatgatcatcacggtcataacgacggtgatcacgcccacggctgcgacggtcgtcgtcatcgctcttgttgcccatgtagttgcccagcgcgccaccggcaccaccgccagccgctgagccgatcagtgcgccggtgctgccgccgacactgcggcctacaacgttgccgcccgccgcgcccaatgcgccaccaatggcggcttcgccacggctgcgcttgtcggcgcccaccgcactaccgcccgcgccacccaaggctgcgccgatggtcgaaccggtgttgccgcctagctgctggccaacgaccgaacccagaaccccgcccaatgcgccgcccacaccggcttcggtggtgccaccggccatggctgcgccactgaccaggccaagggacaacaagagaatcgaggagaacttcattagggaaacctcaagaggatgacggcgcgatcctgaggctgtatctgaattgtgacaatagaaatccgaccagtagcacgagttgtacacaattccataacttattgtttttgctggggaacttaagtcaaattcgtgagtctttagctacttcggaacggccgcttttatgcaaaagcggccttttttgtgcccggaattcctttggcggggtaattccctgtggcgagcccgctcgccacaaccgaagcaaaccgacggatttgtgtcaggccgaacgcgccatgatcaagccattgtcactcgccgcttccaaccggatcgccacgaacttcgacgtcggtgtatggctgccatccccggtgctttccagcggcaccagcgggttcacttccgggtagtaagccgcagcctgccctgccggaatatcgaacgccagcaaggtaaagcccttcacacggcgctcacggccgtcctcccacaacgacacgatgtcggccttctgccctggcttgaagcccaggcggatgatgtcggcttcgttgacgaacagcacgtcacgctggcccttgaccccacggtagcggtcgtccaggccatagatggtggtgttgtactgatcgtgggagcgcatcgactgcatgatcaggtccggtacgcggccggtcgcgtgggtgcgttcgtggatcaggtccttgggcaggatgttcgggcggaagttggcacggcccgacggggtgttccagcggcgcgcgcccgcggagttgcccaggtagaaaccgcccggatgcttgatcttctcgttgaagtccttgaagccgggaatggtgtcggcaatcaggtcgcggatgcggctgtagtcggccaccagccagttccagtccaccggcttgctgcccagggtcgcggcagcgataccggccaggatcgccggttcggacttcatgaatttcgacagcggctgcagctggccattggagccgtggaccatgctgaatgagtcttccaccgtcaccgcttgcgggccttcggcctggatgtcgatgtcggtacggcccaggcacggcaggatcagtgcatctttgccgtgcatcaaatggctgcggttgagcttggtgctgatctgcacggtcaggtcgcaattgcgcagggcttcgaaggtgcgtgggctgtctggcgtagcttgggcgaagttgccgcccaggccgataaacaccttggagcggccttcgagcatggcgtggatggcttccaccacgttgtgcccgttttcacgcggcacctggaattggaagcgacgctccagggcgtcgaggaatgccaccggtgggcgttcgttgatgcccatggtgcggtcgccttgcacgttgctgtggccacgcaccgggcacaggcctgcgcctgggcggccgatattgccgcgtagcagcatcaggttggcgatttcctggatggtcggcaccgagtggcggtgctgggtgatgcccatcgcccagcacatgatcacgttcttgcctttggcgtacatgcgcgccgcttgctcgatctcgaccagggtcaggccggactgttcgacgatctcatcccaggaggtgtcgtcgatcttgcctaggtaatccagcacgttggcggtgtgttcgttgaggaagtcgtggtcgaacacggcctccttgccttcagcctgggcctgacgttcccacagcagcaggaacttggccatgccgcgcaggatggccatgtcgccacccagcgccgggcggaagtaggcggtattggttggcttgtcgccgttggtgagcatttccagcgggtgttgcgggtgctggaagcgttccaggccgcgctctttgagtgggttgatgcacaccacctgggcgccgcgtttaaccgcttcgcgcagcggttcgagcatgcgcgggtggttggtgccggggttctggccccagacgaaaatcgcatcggcatgttcgaagtcatcaaaggtcacggtgcctttgccgacgcccacgctttgcgccagggcaacgccgctggcttcgtggcacatgttcgaacagtccgggaagttgttggtgccgtaggcgcgcacgaacagctggtacaggtaggctgcttcgttgctggcgcgacccgaggtgtagaactcggccatgtccgggctgggcagggcgttgagatgcttgccgatcaggtcgaaggccgcttcccaactgatgggcgtgtagcggtcggtttcggcgtcatagcgcatcggctcggtcaggcggccctggtattccagccaatagtcgctctgttccagcaaggcggtgacgctgtgcttggcgaaaaatgcaccatccacgcggcgcttggtggcttcccagttgaccgccttggcgccgttttcgcagaacttgaccatgccgctttccggcgagtcgccccaggcgcagcccggacagtcgaagccgccgttctggttggtcttgagcatcatgcgcaggtttttcagcgcgttgtcgctggtcagccaggcctgcgccacgctgatcagtgcgccccagccgccggccgggcctttgtagggcttgtagcgcggggtcggggtttggtcggcttggtgatgttggttcatggctggttctccatcgcaggactgtagacccgcggcgcacttttctgcggcaggtggatgagattgaggttatgccggcgcgcccattgcagggcgaggccggtgggtgacgacaggctgaccagggtctggatacccgcgcgcaggactttctggatcaactccaggctgcaacggctggtaacaatcgccaggccgccttcggtcggaattttttggcggatcaatgcaccgatcaatttatccagggcgttatgccggccgatgtcttcgcggcccagcaacaattcgccctggccgttcataaatacggcggcatgcacggcgccgctgtactggcccaagggctggaacgcgctgatgcgttggcgcaggccatccagccactcggcgggcggcaatggcgcgcccggcaacacgtctaggtcgggcagcgcttgttcgaccgcttccacgccgcacaggccgcagccactggtgccggccaattggcggcgctgctgcttgaggttccagaaggcgcggctggatatctgcacctgagcgtactgggcagagcctgatccgctgagctttaggtcataaatgtcgctaacgtcggcgataatgccactgccgatgctaaagccgacgataaagtcttccaggtctgtcggcgtcaccagcattaccgcttggctgatgtcgttgtaggcaatcgccaacgccacttcctcggccagggctgtgctggcgaattccgtgtgttcgagattgcaatactggtagctctggctggcggcgggcgctggcgtttcaagagcgggcgccgcgcagactgggcgcttggcgttcatggggcagtaccaccggcggattgatcagtgtttagactaggcgcgacaaagcgtcgcgtctaattgccagtactgatctaccgatagatgacgtcgatcaaggctcgttttgcgatttttgatacagcgcgaaacacgcctcggccaacgccgagcgcggtgcaccgcggcgcatgatcaagcccagacgagcgagtgtatgggcgtcctcgatcggctgcaggcgcagatgctcggtgagtgcgtccaggccaccatccaaaggcatcacggcacagcacaggccgccatgcacggcttgcaacaactgatggacggcatcggtctgcaacagcggctgcgggttgagcccacggctgtggaagttgtggtcgatggactgacgaaagtgcatgccgctggtgagcatgcccaggggcagttcgatcagggcttcccagctcaacggcgtgtcgccaaagctgaagaagcgttggtcgtaaagcaggcccatgcgggtttcgcccaaggccagggagtcgaagcgctcgttgtccaggcgctccaggtaagacacgcccaggtccaggcgattgctcgccagttgctcaaggatctgttcggagctgagcgccgacaactcgaagcgcaagttcgggtgctctttatgcagttgctgcatcaacgccaagggatcgaagctcgacagcggcaccacgcccaggcgcaatgtgccgacgaggttgccgcgacaggcggccgcttcggcctgcaaaccgtcatacgccgccagcaccgtgcgcgcccaggcaagcacgcgttcgccgggggcggtaaagccctcgaagcgctggccgcgattgaccaagggcaggtccagctcttcttcaaggctgcgcaggcgcatcgacagggtcggttgagtgatgtggcaacgcgccgccgcctggccgaagtgacgcgtctcgtcgagggcgatgaggaatttcagctgcttgatgtccatcttcgctccagggcttattccaatggcggggggattctagcgcgtttgggtcttttgccgggctggaacccaagtctgtaggactggtctagtcttgggcatctggaattcaattaacaaggagcgcgcactatgagcattttcagctttatcaaggaagccggcgaaaagattgtcgacctgttgacgccgggtaatgcaaacgccagtgagcagttgaaggagcacgtgtccaaagtgggtctgggtaatccgaatgtgcagaccaccgtggatggcgacaaggtgaccgtgaccggtgaagtcgccacccaggaagagaaagagaagatcctgctggcgctgggcaatattgccggtgtggccagtgtggatgaccagatcaccgtaaccggcccggctgttactgccgcccgtttcgtcgtggtgaaaaagggcgacacactcagcgcgatttccctggcgatgtatggcaacgccaaccagtacaacaagatcttcgaagccaacaagccgctgctgtcgcacccagacaaaatctacccagggcagacactgcgtattcctgagtaaaacgcaggacgaaatgtgggagggggcttgcctccgatggtggtgtgtcagtcactgaatgtgtctctgatgcaccgccatcgggggcaagccccctcccacatgggttcagagtccggcaatgagatcccggtagtcttcgactgctgcaaattcttgtgtgtccttcggccccttcttgctgtccggctccttcaccgccagcaaatgccccacgccaaacgcctgggcgctgcgcaggatcggcaaggtgtcatcgataaacagactacgtgccgggtcgaagccgatatccgcttgcagggcatcccagaactgcgggtgttccttggcgaaaccataatcgtgggagctgatcaaccgttcgaaatacggcgccagttcaatgcgttccaacttcaatgacagcgaatcacgatgagcgttagtgatcaggatcacacgcttgccagcctgtttgatcgccgcgaggaaggtatcggcatccgggcgcagggcgatcaggtgagcggtttccagcttgagttcgcgtaccgggatcttcagctcagtgctccagaaatccaggcaataccattgcaactgtcccgcgttacgctcgaacagcggctgcaactccatctcggccatggcgcggctcacgccatgcaactcggcgtagcgctggggcaggtgttccatccagaagtggttgtcgaaatgcaggtcgagcagggtgccgtccatgtccagcaggacagtgtcgatggcgtgccagggcaaagagggcatggggcggtctcatgtaagtaaagatatccgacacagacaatcggaaaagccacggtatagtaacccgatcacgccaaggagccgctcatgcgccagaaacccaccgtcctcgcccgcgaaatagtcgccagtagccgtttgttccgcgtggaggaagtgcaattgcgcttttccaatggcgttgagcggacctacgaacgcctggtgggccgcggtgccggctatggtgcggtgatgatcgtggcgatgatcgacgctgagcatgcgttgctggtggaagaatactgcggtggcaccgacgaatatgagctgtccttgcccaagggcttgatcgaacccggcgaagacgtgctggcggcggccaatcgcgaactcaaggaagaggccggctacggcgcccggcagttggagcacctcaccgaactgtcgctgtcgcctggctacatgagccagaaaatccaggtggtactggccaccgacctctatgaagaacgcctggaaggcgatgaacctgagccgatgcgtgtggaccgggtcaacctgcgtgagctgtcgatgctggcgcaaaatgagcaattcagcgaaggccgcgccctggccgcgctgtacctggtacgagacctgttgacccagcgaggagcgtttaacgcatgagcgaactgtttttaggccacccgtttattgccccggttatcgagctggcccgtcaggccggtgaagtgatcctgccgtactggcgcgctgacgtggccgttacgtccaaagccgatgattcgccggttacagcagcggacttggccgctcaccacctgatcctggccggcctgaccgcgctggacccgagtattccggtgctgtccgaggaagatgccgatatcgaccagagcgtgcgtgccggctggcagcgctggtggctggtggacccgttggacggcaccaaggagttcatctccggcagcgaagaattcaccgtgaacatcgccctgatcgaacagggtcgcgtggtgttcggtgtggtttcgatgcccaccaatggccgttgctacttcggtggcgctggcttgggggcctggcgctccgacgtgaaggaagcgcccaagcagatccaggtgcgtgaagcgccggcagcgggcgagtcgttcaccgtggtcgcgagccgtcggcacaccagcccggagcaggagcgtttgctgggcgggctcagcgaaggcctgggcgcgttgaaactgacgaatatcggcagttcgctgaagttctgtctgttggccgagggcagtgcagactgctatccgcgcctggcgccgacctcgcagtgggatacggctgcagcccaaggcgtgctggaaggcgcggggggcgaagtgttggaattgagcggtgagccgttcagctacccggcgcgggcatcgctgttgaacccgttctttctggcgttgccggccaaggccgcgtggcgcgagcgcttgctgaccctggcccgatcctaaggccaaaggtgggaggggcggtgtggcggtcagcggtgcaggacgtactgcccggtaaaggccactgcacgctcctcgctgccctcatttacaacccatgtctccagcgtcaatcgtgcccgaccatagcgcttgtacgtcgccacaaagcgcttccacaccttctcctccggtgcctggcacaccaccgtcgcatcccgtgtgaccggcagcggatagctgatctgcccttcctgaatcacgatgtgcccgtcttcgatgcctgcttcacgcagttgcaagtgcagccagccccaacccgccagcactgcgccgcaatacaggctgccgccgaacatggtgctcttgtggttgatgttggcttgcaagggcagatgcagttccagccgcccgtgttgccagtcgagcaccttgaggcccatttcccgggtgagggggatgtcgtggtgcaggatggattccaggtaacggctgtcgcggttcatgggggcctcttggcgagtgggggcggtcattcgtcatcgccgctttggttggcgaaattcaggccgtgcttgcgcagcttgtcgtgcaaggtcttgcgcggtacgccaagggcttcagcgaggctgcgcatggagccgtgggggcgggtcagctcggcggcgatcaggcttttttcaaactgctcgacctgttcgctcaggccgcccgaggtggacgtcagcacaccggcggcagggttgtccggcgttgcatccagtgccagctccaggcccagggcaaagcgctcggcggcgttctgcaattcgcgcacattgcccggccagctatggcgtagcagcagcgcgcgctggccgggttgcagttcgtgcaacggcaggccgtggcggctgctggcctcatcggcgaaatgctggaacagcatcagtgcatcctcaccccgctcacgcagcggcggaatacgcagcggcgcgacgttgagtcggtaatacaagtcggcacggaagcggccctggtcggcggactggcgcaggtcttccttggtggcggcgatgatgcggatatccagcgggatcagttgattgccacccaggcgctccaccacacgctcctgcaacaggcgcaagagtttgacctgcacatccaggctcatgctttcgatttcatcgaggaacaaggtgccgccgttggcgaactcgaacttgccgatgcggcgtttctgcgcgccggtgaaggcacccggctcgtggccgaacagctcgctttcgaccaccgattcagccagcgccccggcgttgatcgccacgaacggcccgctgcggcgactcgacaggtcatgcagcgcacgcgccaccacctctttgccggcgccggtttcgccgagaatcagcacatcggccttggtcgcagccagggcgccgatctgttcacgcaggcgcagcatttgcggcgaatgcccgaccagtcgcgtgctcaattgctgacgatcgctgagcgccaggcgcaggctgcggttgtccagtaccaggcggcgcagggccagcgcacggcgcacgctgtcgagcagggcgtcgctggcaaagggtttttccagaaaatcataggccccggcgcgcatggcttgcaccgccagcggcacatcgccgtggccggtgatcagcagcaccggcaggtccgggtcctggccgtgcagttcggcgagcagctccaggccgtccatgccgggcatgcggatgtcactgacgaccacgcccggccagtcccgcgacaggcgcgccgtgaggccgctggcttcgcccagggtcaggactttcagtccggccaggtccagggtctggcacagggcctgacgcaggtgtggatcgtcgtcgatcaacaccacctgaatctggttatcgatactcatacactgcggtcctcggacggttgcagactgacgcccggcgagccggcacgcaatttcaaggttaacagcgcgccgccttccttgtggttggcaaacagcagttcgccaccgaaggcacgcatcagggtctcacagatcgccagccccaggcccaggccctgggtgcgcgtcttggtggtatagaacggctcgctggcgcgccccagggcttccatgcagaagcccgggccgttgtcacgaatgtacaggttgacgccctgttcggtggtttcggcactcagccagagtctgcgcggcgggcctttttcggtgagggcgtcgagggcgttggccagcaggttgcccagtacctggcgcaggcgggtttcgccggcttgtacccacagggtggcttccggcaaatcgcggatcagttccacctccatcgaccgtcgccgcttggccagcaacgccagtgcatcgtccagcgccggttgcagggccacgctttcgggcgcgtggcggtcgcggcgggcgaaggcgcgcaggtgggcgatgatcgaggccatgcgcccggtcagttcgctgatcagcttgaggttgccgcgggcgtcatcggtgcgttcatggtcgagcaggatttcggcgttttccgcgtagctgcgaatcgccgccaggggctgattgagttcgtgactgatgctcgccgacatggtgcccagcgccgacagtttgcccgcttgcaccaggtcgtcctgggcgcgtaccagctcctgctgggcgtgttcgcgctccagcacttcctgtttcaggcgccggttgaggccttccaggtcactggtacgctcgaccacccgcgcttccagctcgcgacgggccttggcttcgaacgcaatgcgctccagatagtgacggcgacgttgcatcatcaagcccaacaacaacatcaacaccaacagcgtcgcgccgccgacggcaaccacagtgcgcaccggacggctaatcaacgaacgcggcgcgaggatctccacgttccagccggtctcggcgatggccgtggattgacgcagccacgcggtggtgctcaggctcagcggctgcgggtcgcgagtcgggtagggctggatagcgatgatggcctggcgttcttcagcggtcagcgggcgggtcgcgcggaatcgccattgcgggcgcgaggtcaggatcaccacgccgttgtggtcggtgaccagcagttgttccggggtgttgccccacaggctttcggtgtggtccaggtcgaccttgaccaccagcacaccgatgatcgtatcgccgtcgcgcacggcggcggcgaagaagtaaccgcgcttggccgaggtggtgcccaggccgaaaaaccgccccaggcgcccggccatggcttcgctgaaatacgggcggaacgagaaattgcgcccgacaaagctgtcttgtttatcccaattggacgccgcgagggtcttgccggtggtgtccatcaggtacatcacttccaccccggcctgggcggcaacctctttgagcagcaggttggcgttgaccaggttggtgctgacgttgggcgcgtccaatgcagtgcgcagggccggcaggtcacccaggatttgcggcagcacttcatagcggtgcagggtgccgagcaggttggcgacatacaggtcgagggtctggcggttctggccggccagttcgctgcggtaatagcgctcggccagatgctccagcggccacaacagcggtgccaggcacaacgccaagagggcgaggctgcgccagcggggtctacgcgggaggggtggagtcatgggagtcgtgcgcctgtgggtacaggcgcattatgcctagtgctgctgtgcaagacactcgcgcaatgcgtcttgccaatgtggctggctgacgtgccactgttgttgcaagcggctgcaatcgaggcgtgagttaagtgggcgctgggcgggtgtcgggtaggcgctggaagggatggcttccagctcggcacaggctttgccctgcttgcgcagatgctcgccgatggcctcggcaaaaccgaaccacgaagtttcaccttgggcggtcaggtgatacaccccccattcccccgctgtgcctgcttgccagcgttcgatcaatgcaagcgtactgtcggcgatgctgccggcccaggttggtgcaccgatctggtcggcgacgatgcgcatctgcggcttttcctgcagcaggcgttgcatggtcagcaggaagttcttgccgtggttggagtagacccaactggtgcgcaggatcaggtactcgccgcccacggccgcaatcgcctgctcgccggtcagcttgctctggccatagacgcccagtgggttcggggtgtcggcttcgatgtagggcgccggtttgctgccgtcgaacacgtagtcggtggaatagtggatcagcgggatgcccagggccttggcttcctcggcgagaatgccgggggcgatggcgttgatggcaaatgcggcgtccggttcgctttcggcctgatcgacagcggtgtgagccgctgcgttgataatcaggctggggcggtgggcgcgcacttgctggcggatctgctctgcattggccaggtcaagctggtcgcggcccaggacgatgagttcgcccaggccctggaggcgttgttgcagttcgcgggagacttggccgtgttggccacagatcaggatcttcatgggaacaagtcggcttccttcaggggtttaccggcctggtccttggcggacaaccggggcgcttcggtcagctcccaatcgatggccagcgtcgggtcattccacaggatgctgcgttcggcgctgggctggtagtaatcggtggttttgtacaggaactcggcgtgatcgctcagtaccacgaacccatgggcgaaaccttccggcacccacagctggcgattgttctgtgctgacagccgcacgccgacccactggccaaagttcggcgagctgcggcggatgtccacggccacgtccaacacttccccggcgatgacgcgcaccagtttgccctgggtgtgttcgagctggtagtgcaggccccgcagcacgcctttttgcgagcgcgagtgattgtcctgcacgaagtcacgcttgagcccggtggccgcttcaaaggcgcgggcgttgaaactttcgtagaaaaagccgcgttcatcgccgaacactttgggttcgaggatcagcacgccgggcaaagtggtttcaacgacgttcactggttctctccggccagcgagtacaggtactggccatagccggtcttgccgaagtacttggcacgttccagcaggtggtcacggtcgatccagccattttcgtaggcgatttcttccaggcaggccactttcaagccttggcggtgttcaatggtctgcacgtactgcgaggcttccagcaagctgtcgtgcgtccccgtatccagccaggcaaagccacggccgaagcgctctacctgcaggtcgccgcgcttgaggtaggcgttgttgacgtcggtaatctcaagctcccctcgaggcgaaggcttgactgccttggcgatcttgatcacgtcgttgtcgtagaagtacaggccggtcactgcgtagctggacttgggcttcgcaggtttttcttcgatggacagggcacggccttcgctgtcgaagtcgatcacgccgaagcgctccgggtccttgacccagtagccgaagacagtagcgcccgtcggccgcttggcggcgccgagcaattgctcgccgaagtgctgaccatggaagatgttgtcacccaggatcaggcacacagggtcatcgccgatgaattcctcgccaatgatgaaggcctgggccaggccatccggggttggctgttcggcataactgaaacgtacgccaaactggctgccatcgcccagcaggttgcgatactgcggcaagtccaccggtgtggatatcaccagaatctctttgatccccgccagcatcagtaccgagatcgggtagtagatcatcggcttgtcatacaccggcagcagttgcttggacacgcccagggtaatggggtgcaaacgcgtgccggagccgccggccaatacgattcccttcatcatgcaatcagatccttaaggtcggtgttgcccaaacgttcaccctggtaactgccgtcctggaccctgcggcaccattccaggttatccaggtaccactgcacggttttgcgcagccctgtttcaaaggtttcttcgggggtccaacccagctctcgctcgatcttgcctgcatcgatggcatagcgctggtcgtggcccgggcgatccttcacgaaggtaatcaggtcggtgaactgctcgacaccagccgggcgctgtggcgccagttcttcgagcagggcgcagataccacgcaccacgtcgatattcttctgctcgttgtgtccgccgatgttgtaggtctcgccgaccacaccttcggtgaccactttgagcaatgcgcgggcatggtcttcgacgaacagccagtcgcgcacctgcaaaccatcaccgtagaccggcagcggcttgcccgcgagggcattgagtatcaccagcgggatcagcttctcggggaagtggaatggcccgtagttgttcgagcagttggtcagcagcaccggcaagccgtaggtgcgctgccaggcgcggaccaggtgatcggacgccgccttgctggccgaatacggtgagctgggtgcatagggtgtggtttcagtgaacaggtcgtccacgccatgcaggtcgccgtacacctcatcggtggagatgtgatggaagcggaacgcgcgcttggcgggctcgtcgagcgtctgccaataggcgcgggtggcttccagcaagctgtaggtgcccacgatattggtctgaatgaagtccgacgggccatcgatcgagcggtctacatgggactcggccgccaggtgcatgatcgcctggggctcaaagcgcttcagtacggcactgacagtggcctggtcgacaatatcggcctggacgaactcgtagcggctgttggacgcgatgctggtcagcgattccaggttgccggcatacgtgagtttgtccaggttgagcacttcgtgctcggtgtgttgaatcaggtggcggattaaggcagagccaataaaaccggcgccaccggtgatgagaatgcgcatgtcagagggccttttccttagacggacattaagcgaatggagcatagcttgagttgtgacgccgagcggtgcaagcgtggtttgcgcagggggttgcgtaagccccctgaacaatggcgatatacacccctaaaaaccgaggccacccccatgttgctcgccaccctgatccatcgcgccagtctaccctgcccgcaagtcagccccgatcaggcggctcgattgcttgagcagtattacggccttagtggcacgttgcgatcgctgggcagccagcaagaccttaactacaaagtcgacagtccccgtggtcggttcgttctgaaaatctgccggggcgactacgctgccttggagcttcaggcccagcacgcggcgctcaacagcctgcaggcggtgcgcgtacccaaggtcatcaaggccctgacaggtgaggaactgctgaccctgaccctcgacggccaaaccctgcatgtgcgggtgctggactatatcgacggccagccgttgacccatctgccccacttggggcgcagggtgatcgcaagctttggcgacctttgcggtcggatgagccaggcgctggcgtcgtttgaacatccgggcctggagcgtacgttgcaatgggacccgcgccatgccctggaattgatcaggcatctgctggcaaccctggaagatttgcctcaccgccaagcgctggaacaagtggctgagcaggtccaggaccgtatgcgtcccctggccgaccacctgccgtggcaagccgtgcacatggatatcaccgacgacaatgtggtgtggcagcgtgatgcgcaacgccactggcaacttcagggcgtgatcgatttcggcgacctggtgcgcacctggcgcattgccgatctgtcggtgacctgcgccgcgctgctgcaccatgccgagggcgacccctttgctatcttgccggcggtccaggcttgccatgcggtgacgccgttgcagcatgaagaattacaggcgctatggccgctgatcgtcgcccgcgcggcggtgctggtcttgagcagcgagcagcaacaacggctggatccgcataacagctacctgttgaaaaatgccgggcatgagtgggaaatcttccatgtagcgacctcggtgccgtttgagctgatggaagcggcgattctcagcagtgttggtcaggcacccacacccgtcgccagccaaggctttgctcctttgttgccggggttggtaggccgcgagttcgcgctgatcgacctgggcgtgctcagcccgcatttcgaggccggcaactgggagcaacccggcatcgatcagcgcctgttgcaggaggcggcggcggtgcatggcttggcggcgagtcgctatgggcagtaccggttgtcgtgtactcggcccgacagtgcgaccgagccggagacgttcccgttgcacgttgaactgcacgtgtcgttggcgacttccgtcgaagcgccgtttgccggtgtggtgcgacggggggccaatggcgaactgcaggtgcataacagcgaagcgaccgtgcggctgtggggtgtaaagccgcttttgcagccgggggctgcggtgctcaagggccaggtgatcggtgaggtcgaggggccgctgacggtacagctttgccgggctgacttgcccgcaccgctgttctgcgcaccgtcccgggcactggcgtggcaagcactgtgcccatcgccggctgcgctgctggggctggcctgcgacgccgagcccgagctggaccccgaggccctgctggcccggcgcgacgccagtttcgcccgttcgcaaaagcactattacgtcgacccgccgcgtatcgagcgcggctggcgcaaccacctgatcgacatgcagggccgctcctacctggacatgctcaataacgtggcggtactcggccacggccacccgcgtatggcggcggtggcggcgcggcagtggtcgttgctcaacaccaactcgcgctttcactatgcggcgattgccgagttttccgagcgcttgctggcgctggcaccggagggcatggaccgggtgttcctggtcaacagcggcaccgaggccaatgacctggcgatccgcctggcctgggcctacagcggcgggcgcgacatgctcagtgtgctggaggcctaccatggctggtcggtggcggcggatgcggtgtccacctcgattgccgacaacccccaggccttgagcagccggccggactgggtgcacccggtgacggcgccgaatacctatcgcggcgagtttcgcgggcaggacagtgcgcccgattacgtacgaagtgtggagcacaacctggcgaaaatcgctgcaagcaaacgccagttggccggtttcatctgtgagccggtgtacggcaatgccggtggtatctcgttgccgccgggctatttgcagcaggtgtatacgcttgtgcgtgcccaaggcggcgtgtgcatcgccgatgaagtgcaggtgggctatggccgcatggggcacttcttctggggctttgaagagcagggcgtggtgcccgatatcatcaccatggccaagggcatgggcaatggccagcccctgggggcggtgattacccggcgtgaaatcgccgaagcgctggaggctgaaggttatttcttctcgtcgtcaggaggcagcccggtcagttgtcgcatcggcatggccgtgttggatgtgatggaggaagaaaaactgtgggaaaacgcccaagtggtcggcgggcatttcaaggctcgcctggaagctctgatcgagcgccatccattggttggcgccgtccacggttccgggttttacctcggcctggaattggtacgcgaccggcaaaccctggagcccgccaccgaagaaaccaccttgttgtgtgatcgtctgcgggagttgggaattttcatgcagcctaccggcgactatctgaacatcctcaagatcaagccgccgatggtcacgtcgaggcgcagcgtggacttctttgtcgacatgctgtcgaaggtgctggatgagcaattgtgattaatcgattgttatcggttatttgctgtcatatttaccgcctatgattttctgttgcttttaaagccgatttttatccgttataaagtcggcatttaccccattcggagccctgaccgccatgaccaccctgcacagtacccctcgcgccgatggcttccacatgcccgccgaatgggcgccacagacgcaaacctggatgatctggcccgagcgcccggacaactggcgcctgggcggcaagccggcgcaggctgcccatgtggcggtggccaaggcgatcgcacgttttgaaccggtgaccgttgccgtatccgccggccagtacgaaaacgcccgcgcccgcctggatgtgccgaatatccgcgtggtggagatgtccagcgatgacgcctgggtgcgcgacaccggcccgaccttcgtgatcaacaacagcggcgaagtgcgcggcgtgaactgggatttcaacgcctggggcggttttgacggcggcttgtatgcgccgtggaaccgcgactcccaggttggcggcaagatcctcgagatcgaacgcgcgccgcgctaccgcaccgaaggttttgtgctggaaggcggttcgatccatgtcgacggcgaaggcaccctgatcaccaccgaagaatgcctgctcaaccgcaatcgcaacccgcacctgggccgggccgagatcgaagcagtgctgagcgccaacctggctgtggataaaatcatctggttgccggatggcctgttcaacgacgaaactgacggccatgtggataacttctgctgctacgtgcgcccgggcgaagtgttgctggcctggaccgatgacgcgcacgacccgaactacgcgcgctgccacgccgccctggacgtgctgcaaagcagcaccgacgcccagggccgctcgttcacagtgcataaaatgccgatcccggggccgctgtacgccaccgaggaagaatgcgccggtgtcgacccggttgacggctcccaggagcgcaatccgaccgtgcgcctggccggttcctacgtgaacttcctgatcgtcaacggcggcatcatcgccccaagcttcgacgacccgctggacagccaggccaaggcgatcctgcaggacctgttcccgcagcacgaagtggtgatggtgccgggccgcgaactgttactggggggcggcaatatccattgcctgacccaacaacagcctgctccgcacaaaaattgagtgcagttgtaacagtgctttaaccggagccaggggctatctggttcgagcgcttacagcaagcccgcggcccagcaaggtcgcgggcttttttgtgtgcgtatgcctataaacacgagacattggcatagctcttgtatcggtgtcgtcacagtggcccaagttaatgactgcgcagttctgtcataaaccttgagtaagttagccgctcacgcagtaggagagagcgctgaaatgaatgccgatatcaacctgatgtacacgcgcacgttccaccccttgcgggtcaacggcgacgcgatccatgcgctggcgctctggttgaaggaaaacggttcgcgacagatcaggcaacagcctgacttgcgcagcgtgatgagtaaacgctatccggcggggttgttcagtgaggatgaagtgcacgcgttgtgtgacctgctgaaaaactaagcaacacagagaacaaatgtgggagggggcttgcccccgatagcggcgtgtcaggcaaaaatatcaaccgaccggttgccatcggggggaagccccttgctacaccttttggatgtattcggtttagaaactgtaggtcccagtcaccaccacgctgcgcggctctcccggctggatctgcgccacgctggtcgccgacgcatagtagtttttatccgcgatattgttcagcgccgccctcacgtcccattccttctggcggaacccggccaacgcatcccaacggccataacccggcagcaccacggtgttgagactgtcggcgtaacgatcccccaccagcgtcaaaccggtttcggcgtaccagcccatttctggtttccaggtgataaacaggctgccgttgcgcttggccacatcactgacgcgcttgccttcaaagccgttgttgtccttcaccaccgtggcgtcctgcaggccgataccgccgcgtacgtaccagttgccgacgatcttgccggtggcagtcagctccacgccgcgtgagcgttgcaaaccgctgagcagggtgatggtgcggtccagcgggtcgctggtgcggcggttgtagagttccagttcgtacaccgccagggtggtgctcaggcggtcgtccagccagtcgctcttgaccccgatttccttctgtttggtcagttcggggctcaggtcgttggcgccgctggtggcgctcggggtgatgccgatcaggccgccgccggctggggagaacgtcttgctccacgaggcgtagaacgagtggttttccaggggcgtccacaccaggccgatgcgcgggctggcgttatggctgtcgacatcttgctggaggttgttgagtttgttcttggtatcgacttcaaagcggtcgtaacgcaggccagccaggagctgccattgatcgttcaggcgcagttggtcttgtatataaaccgcacgactttccacttcggtgtggttgttgctggatacgctcatccgcccggtgtggctcaggtggcggttgggctggttgaggttgaggctcggcacggtgttgccaccgttgtagagcttcggatcgcggcgttggctgcccatttcgacgccggtgagcaggcggtgttccaggccgaaggtgctgaagccgccttccagttcgacgttgttgaagaggttccgcgtggtcaggtcttgctgccagcgctggcgtgtcacgctgttggtcgcaggcacgtaggcggtctggtaggtgttgtcgaaatcactgtcgagcttgaacacgcccagggtctggcgcagttgccagttgtcgttgagctcataggccagcttggagcgcagggactgggatttgtcgtcgatgtagtcgcggctgtcgccgtaggtggtgctgcggctcacatccgccggccggccgttgaccccgggaatgccacggtccggcgtgcggttgtagcggctgtattcgtattgcaccagccaattcaggtccggcgtgagctgccagctcatggacggtgcgaacagctggcgattgccgctgacgccatcgcggaagctgttgttgtcctggttgcccatgttcaggcgcaggctgatgttatcggtggggtcggtgctgaggtcggcatacaggctgcgcaaatcgttgctgccgccttgggcctcgatactcgacttgtggccggcggtaggcagtttgctcacacggttgacgatccctccctgaccgcctcgcccgtagagtacggcagctggccccttgagcacttcgatgcgctcgatgttgtgcaggtcgcgcacgtactggctgtcatcgcggatgccatccaggtagaagtcgttgctcgcatcgaaaccccggatgcgcaggctgtcgaagcgcgtgtcggcgccgctgctgacgttgggaatgccgctcaacgcctggcccaggtcattggtgccgtaggcgcgcaggctttcggtcttaaccgagtcgatggcctggggcacataacgcaccggcgtagcggtgcgggtggcggtgctggtttccttgacgcgtgggtcgtcttcgtcagcttcggcgctgatcgaggtttcgggcaaggtggtggccgcacaggcaaaaccggcagacagcagaacggaaagcccaagggtgatgggcgtcaggcgaggggcaggcattaaggaatgtatccgaatggtttgggaggaaaactacgcgttaatggtaatgctttgcatttgcgcgcgttatcaattgccaaacgtatcggcttttaaatatgttacggaatgtgttttttgccgttttgcatgcggttttttgtcgctttcaatgtggttgtaggcctgcgcttagaattatttcgcctaaatacagacgattcgcgaaattgacacatagttccgggcgcgactaggattgcgcccaacgcctgtggctaaccgccatgactcatccaataaaaaaggcccgcggcatgttcagtcgtccgcgggccttcttttttccggattcagtcgacaccagaaaaagcattacggagcctggtgtcacagcgcgtactcaaccaggaataaggaatacaagaaaatgttgaagcaacggatgagtctgatcgctctggggattttgagcgcatcgacagcaatggcaaacgaccaggaccagtccaagggttttatcgaagacagccacctgaacatcgccgcacgtaacgcctacatcagccgcgactacaaaaacggcaagcaagacaaagccgaatggggccaaggcttcatcggcaagctggagtccggtttcacccagggcaccgtcggtgtgggtgtggacgtgatcggccaatacgctatccgcctggacggtggtaaaggtcgcgctggcgcgggcggtatcgacttcttcaaaccgggtaatggcactgccaacaaccctggctcggcaccacacgacctggccaaaggcggcgctgccgtgaagttccgcgtttccaacaccgtgctcaagtacggtgatcagttcccggccgtgcctgtgctgcagtacgacaactcccgtctgttgtcggaaacctacaccggtacctcgatcgtttccaaagagatcgccggtctgcaactggacgcgggtcacttcaccaaagaagcgcgcaagagcacggaaggcaccgacagcggtcgcctgaaaagcatcgactacatcggtggtagctacaaattcaccgaaagcctgtctgccgcgctgtacgcctccgacatgcaggacgtgctgaagaagcaatacgtcaacgtcaactacgtactggccctgccagagaagcagtcgctgacttttgacttcaacggctacaaaaccaagctggacaagagcttcgccctggaaaaccaaggcagtgaagacgcgcgcgacaacaagatctggagcctgggcgcgacctgggccgttggcccgcacagcttcaccgttgctcaccagcgcagcaccggcgacaccggctacctgtacggcggctaccgcaacgctggcggcatcggcgacggtggcaacaccatcctgctggctaactcctactggtccgacttcaacggcaaggacgagcgttcgtggcaagtgggctatggcatcgacttcgccaccttcggcgtgccgggcctgacctacaacgttgcctacgtgcgtggtaccaacatcgacgacggtaccaaccgcggcgacggcaccgagcgcgaaatctggaaccagttcaagtacgtggtccagagcggcccggccaaagacctgagcctgcgcgcgcgcgcgtcgtggttgcgcgtgtccaacaacgccagcaactacaacgtaggcggtaacgaaatccgtctgttcgccgactacccgatcaacgttttctaattgatccggcgtcgcgcctgagtttcaggcgataaaaaaccccgactggttcggggttttttatgcccgtctgtgcagggcagacttgttacatcgaatcactaatgaagtacccgtgcccacctttatcccctcccggcgcaagcctaaattggccccactgcctgcccgtcaccccgatggtcggccactggagtcttcgccatgccctttgtcagcctgcgcattacccgtgacggcgttaccccggagcaaaaagcccaggtcatcgccgaattcactgaaaccctcgaacgggtcctgcacaaacgcccggacctgacccatatcgtcatcgaagaagtcgacaccgataactggggctacgccggcatcaccaccaccgaataccgcaaatcccaagcctgaatccctaccggagcatcatcatgaaaaaagtcgtcatcatcaccggcgcgtcccaaggtatcggcgccgctgtggtccaggcctaccgtgccctcgattatcgcgtggtcgccacctcgcgctcgatccagccgtccaccgaccccgacatcctcaccgtcgccggcgacatcgccgatccggccacggcccagcgcatcatccgcgacaccctggccaccttcgggcgcatcgacagcctgatcaacaacgctggcatcttcatcgccaagcctttcacggattacacccaggaggactacgccaacgtgctcgcggtgaacctcaatggtttcttctacatcacccaactcgccattgccgaaatggaaaaacacggcgccggccacatcgtcaacgtcaccaccagcctggctgaccacgccattgacggcgtgccgtcggtactcgccaacctcaccaaaggcggcttgaattcagcgaccaaatccttggcgattgaatacgccaagcgcgggattcgggtgaacgcagtgagcccggggatcatcaagacaccgatgcacggcgcagaaacccacgcggcgttggggcaattgcacccggtcgggcacatgggggaagtgagtgacatcgcccaggcaatcgtctacctggaaaccgccggctttgtgaccggtgagattctgcatgtagacggcgggcaaagcgccgggcattgatacacacgtcccggcctaacccggccgggcgttgtcatcccgtggcgagcggccgaaaaaggctttgtaagcccggctgaacgcggcctcggacgcgtagccaatcgcgaagcccacttccccgatgcggccgtcctgtttggccagcatggtttttgccagggtcagccgccattcattctgataccgaagcggcgagcggccgaccaaggcgctgaagcgttcgcagaagttagacctcgacatgcccgccacctcggccagattgtcgatgcgccattgcttgcctggtgtttcgtgaatggctttcagcacgcgcgcgatacgcgcgttcgacagtccacccaaccatccggaagcggcgccctggtgcacccaggtgcgcaggatgcgaatcaccaccaggtcgatcaggcgcgaaatcatcaacgcgccgcccggttgcgtgtcgtgagcttcgagcaacatgaaatgcagaatgccttccgcccacgcggcggcgtcggcttgctggatatggatcagccgcggcagggcgaacagcatggcctggaagctgctcgcgtcgaaccagaagcggcagatgaccacggttgccggcccattcagggcggtcagcgtaatgcccttggggtcgtggggcagcaggatcacatcgccttgctgcagcgtcaggggtggctgatgggcaacgttcagatgcaaccgaccgtgctggagcacgcagatgtgcgcgcttttttcatccagcgtgaggggctgtgcctccgtcagcgtgcaggaatagacccgatcacctgtcaggcggatctgcgccagtacctgggacagcaggtcgcccttggccagcccttccagctgcatttgtggatgaatgatcaagttttccaggggattcatcatgtcggttcgaccccgccctcactaagctgaccgccgagatcatagcgcgccggcgccatcgggatgagcctttcccgcgctgaccgtttttgcacatcatccaaccacatgggaacaccactatgttcggaatctccgctctcggctggctgcacaccctcggcagcttgccggccattccactggccgcctacatgtttatccggcatggccgcatcgtgccgcgctcagtgccgggcgtgttgtattttgtgtcgatgttgatcggcggcctcaccgtgttcctggtcgcgcatcagcccgtcagcaacgccatcggcatcattacgattacgctgctgttggcgggttatggggtagggcgcgtggcctggctggggcaagcccgggtgtatgtggagacgatcttgctgagcctgacggcttttttcctgatggtgcccaccgtgtccgagacgttgcgtcgcgttcccgatggccaccccttcgtcactgacctgaaatccccggtgctgctgggtgcgcaggcaggcattgcgttggtgctggtgatcggcgtgacggcgcaaatgttgtacctgcgcaggcaatcgcgcctcagcactgcccaacactgaaaaaccgggcagaaactgcccgctttcatcgcccaacaccgtgtagccgcccatgaagtcggaggcagcaatcgtcacgcaagtcgtttcgaccacacagcctgggacaccaatatgggtgcagtagacgtgatgccttgaagggtgacaagcaggctgcgccctattaccagcgtcaaataagtggctgattttgtcgcttgttgccgtttagcggcaaattagacaattcattgacagtctcttttggatccaccatgatcgccacgaatttgatggctctaagccattaaaatgacattagcaacgcgcattcgtcccatgctgtggttcttcaagattcagggataaggcggcttggactcggatggccaggcgacgttggtcagggtagccctaaaacactgtcacctttaattagcaggctcgtttgtcgctgcctgcgctcgggtctttaggaagtaaacttcatggctgtaggacgaattctggtcaccggtggtgcaggttttattggttcacatctggtcgatgcgttgctgggcaaaggctacaagattcgcgtattggacaacttgtcgaccggtaaggtggctaacctgcccgccggtaatcctgatctggaactgctggttggcgatgtcgccgacagcgccgtggtcgagcaggccatgcgtgattgcagcgcagtcgtgcatctggcggcggttgcgtcggtgcaggcctcggtagacgatcctgtcgccactcaccaggccaatttcgtcggcacactcaacgtgtgccaaagcatgctcaaggccggtgtggcgcgtgtggtgtttgcctccagcgcggcgacctacggcaacaacggcgaaggcacggccatcgccgaagacacgcccaagtccccactgacgccttatgccagcgacaagttggccagtgagtattacctggacttctaccgtcgcgagcatggccttgagccggtgatcttccgctttttcaatatcttcggtccacgccaggatccgtcttcgccgtactccggtgtgatcagcatcttcaccgagcgcgcgttggcgggtaagccgattaccgtctttggtgacggcgagcaaacccgcgacttcgtctacgtgcaggacctggtgagcatcctcgtccaggcagtcgagacccgcgaaccggcacctgaagccatcaacgtagggctcagccgttcgaccagtctcaacgacctgatcgctgaactgggcaatgccaccggcaccgcgttgaacgtgacctaccaagcttcacgtcaaggcgacatccgtcattcgcgcgctgataacgcccgtctgctggagcgctttgcactcccgcaaccgacctccattggccagggtttggcgcagcttttgcgcagtttgtagctcgccggtcacttcgcccgacgtctacgcagtatcggctcagtcatcttcaagagtgaattatggaaatcgttttccgcaggacgcgtatccgcgcgatcgctgagcggctgttggctgctcttgccttattcgtcggcgggccgagcgtgcacgctgctgccttggcccaaccgaacagcgtggctttctggtacgccgagcaaccaccgctgccggaactggcgcagttcgactgggccgtggtcgaaccggggcacatgacgcctggcgatgtgaaaaccttgcgggcgttgggcagccagccgtttgcctacctgtccatcggtgagtttgacggcaataaggctgaggtcgagaaagccgggttgagcaaagcggtttcccctgtgcggaatgacgcctggaacagccaggtgatggatctcacctcgacggtctggcgcgagcatctgttcggacgtgccaaggccctcgaagcgcaaggctatgcgggcctgttcctggacaccctcgacagtttccaactgatgcccgaggcttcgcgcgagagccagcgcgtcggcctggccagcttgctgcgtgagctgcacaagcgtcagccgaacctcaagctgttcttcaaccgtggtttcgaagtgttgcctgagctggacggcgttgccgccgccgtggcggtcgagtcgatccatgccggttgggatgcttccgccaaacgctatcgcccggtgtccgagtccgatcgccagtggctcgaaacccacctgcaaccgctgcgcgccaagggtgtgccgctggtggccatcgactacttgccacccgagcgtcgtgaggaggcgcgcacgctcgccaagcgtctgcgcgatgaggggttcattccctacatcagtaccccggacctcaacaccctgggcatcagcagcatcgaggtgcagccgcgccgtatcgcgatgatctacgacccgcgcgaaggcgcgctggaagatgccgccggccatagcaacctgggcggattgctggagtacctcggttaccgagtcgattacctgcctgccgacagtgacctgccgctctacggtttcagtggcttgtacgcgggtgtggtcacctggatgaccagcggcccgccgcaggatgcaccggcgttcaatcgctttatcaacgcccgtctcgacgaacaggtgcccgtggtgttcttcagtggcctgccggttgaagacaagttgttgctcaagcgcctgggcctcaagcgggatgcgccgcccgccactcaagtgttgaccatcacccaccaggacaaggccctgctgggcgcattcgaggcaccggtggtgccgcgctcccgtgacctggcggcggtctctgtattgcccaacggcccaaccccggcgttgtccttgagcggtgccaatggcgctgttttcaacccggtggtggtcggtaaatgggggggcctggcgctggcgccttacctgctcgaaatcaacaacgagcgtagccgctggattcttgatccgttcgcgttccttcaggccagcctgcgtctaccggcgcaacctcggccggacaccaccaccgagaatggccggcgcattgcgaccgtgcacatcgatggcgacgggtttccctcccgcgccgaagtgcgtggcacgccctatgcgggtcgtcatacgctggacgattacatcaagcccaacccgttcctgacctcggtgtcgatcatcgagggcgagatctcgccgcgcggcgcgttcccgttcctggcccgcgagctggagccgattgcccgtgagatcttcgccaaccctaaagtcgaagtggccacgcacacctacagccacccgtttttcatgcagccggagaaagccaagaagcgcgagaatttcaacgcggaatacggcttgaacatgaaaatcgtcggctacgacaaaatcgattttcgtcgggagatttttggctcgcgcgattacatcaaccagaacctgacgacgccacagaagccggtgaagatggtgttctggccaggcgatgcgctgccatccgccagcaccatcaagctggcctatgacgcgggcttgaaaaacgtcaacggcgccgaaaccatcatgaccaaggccaacccgtcgctgaccgggctgaacccgttgctgcggccgacgcttggggggttgcagtactacgcgccgatcatcaacgaaaacctctacaccaacctgtggaaaggcccgtactacggcttccgtgagttgatcgagacgttcgagctcaccgacagcccacgccgcctgcgcgggctgcacctctactaccacttctattccagtaccaagcaagcctcgatcaaggccatgcacgagatctacggctacatgcgcgagcaacagccgatgtcgttgtggatgagcgactacgtcgaccgtctgcatggcttgtaccaggcgagcctggcccgtacggccgacggcgcctggcagattcgcgggatggacgcgctgcgtaccgtgcgcctggatgcacaaatgggctggccggacttgctcaaatcccaaggtgtcgcgggtgtacgtgacttgccgcaagggcgctatgtggccctgagcagcgacaaggcgttgctcgcattgcgtgcggacagagatccccgtcctgcgctggaggaggccaacgtgccgttgctcgattggcgttacctggacgatcgtcgcgtgagcttttccttcgccggtcagttcgacctgaccttcaccgtgcgctcggcaaccgcctgccgcgtggaagtcgatgggcaacgattcgcgggcaaggcttcggccggcctttggacttttcaacttcctatgaagcaggtgagtaatggtcaactcctctgcaactaaaagcagccgcctgctcaacccatgggcactggcggtggtcgcggtcgccgtgggcggcctgctgtgggcaaccttccagcgtgaagaagtgttccagcctgacgggcgcgaacccgacgccgtgtcggccaactatgccgagctgttgctgacggcgcacccggatgacgaccacctgcgtttgcaattggtcgacttgttgattcgcctgggtgactacaccaaggcgcgccaacacgtggacgcctggcccaagccgcagccggagattcaggcctactatcgcctggaactggacgcgctggtcgccgccagtggcaacgacctgattgcgcagcatgcgttggtcgagcgcctgcaaagcttcgatcatcgcaagctgccggtggcccagctgcaaagcctggcgaagctggcgctgaccctgcaggcgccggcgtttgccgccagtgtgttcgaagagatcgcagggcgtgacccggcgcaacgcaccgaggcgctcaaatcagccgcgcagtggtacttggcgggtgagcagcctgcgcgcgcggcagacatctatctgcaactcaagcgtgacgcccagcagccgggcgaacggcgggagtacgcgcaacttgcgttcaacagcctgctctcggccggtcgtgacgagcaggccgcgcaagtgctggctgacgagttgccccagctgaccaacccgcagaccgacgtggcgtggctggagcagggcgtggatatcgccgttgcaaccaagcagttcgacctggcccagcgcgtgctccagcagtggcatgacctggagcctgacaaccgcaagatcctggtcaaggaattccaggtgcgcctgtccatcaatgatctggcgggtgcgtgggaaaccggtcaggagttggtcatcgattacccggatgacaccgagttgctggagcaaatggccaagctcggtgagtggcgcggtgataacgaagccgcgctggattactggattcgcttgctcaaactcaaggaagacccgaaaacccgcgagcacgcctggcgccttgccagcctgcaattcgacttcgcccgctcggtcccgttgctcgccgacatcatgcagcagcgtgcgctcacggacatcgagctggatgcgttgatctacggtcatgaatcccgtggcacaccggccgaagccgaggcatggctgcgcacctacctgcgcaagtacccggcccatcgcctggcctggactcgcttgctgcagaacctggaaaacaccgggcagttcgcggccaaaggcaagctctacaaggactatgcaaaacgctacaagctgaccaccgccgagcgggtcgattgggccagcacggaaatgaagctgtttgatgagccggcggcctgggaagtggtcaagtcggacgactcatccatcgatgatccggaatattggcgcacccgtgccgcgctcgcctgggacctggagcgcgacgaggacttgcgcgtctccctggaaaaactgctgtccctcaacggcaagctgaccagcggtgacgagagccagttgatcaccctgtatcgcaccagcgacccgcagcgcgccttgaagttgatggtcgacagctggcaccgcgcccaggatccgcaacggttggtcgaggcgctgcaactggcccaggagctgcaggagtgggatcaggtcgttaccctgctggaagacgccaagcaatacccgcaggcctacgagcaagcccaggttctggcggtacgcggtgccttggcggtggagcagggcgatccctccgaggccgagcgcctctatctgctgggcttgtcgcgctaccccgatgacaacctgttccgcgagcgtttgacctggctgtatgtcgaccaggccgacacggcaaaactcaagcccctgctggccaaatggcgtgcctatgcacgggcagaccgcctgctctggctgccgttcgccagtgccagccagctgttggggcgcgatgccgaggcgttggcctggtatcgcatgtacctcaagctcagcccgaacgactggctggtgcaggctgcgtatgccgacgcactagacacctccggctaccaggacgccgcccagcgcctgcgcttgaagttgctgcgcagccccgaggccgacaacttgcaaccgtcgtcccaacgctatgcgatctggctgcgcttgatgtcgagcagctactcgccgcagaaggcccagcaagaactgctgaagtggaaagacggttcgccgtcgatgaaacagctgtggttcgaacgcctgctggcccgcctggatgcgaccaaccagcaagcgcagaaagacgactggctggcctgggcgcgcacccaagggctcaaggttgaccgttacgagcaaatccaggaagccttgcgcagccgcaataaagcccaggtcgaaaccctgttggccagcagcgacctgaacccggcgcagcgcgcacaggcgctcagccgtttggggcgtaccaacgaggcactggaaaccagcctgtcggcactgggcgacgaccagccggattcggtgaacgagcaactgcgtcgccaggcggtggagatccacgaagccaccccgcaaggtgcgttgctgtcgtatcagaagcaggatttcggtggcttgtcgtttgaggcgccgcgcctggaaatcgcccacaacctgggtgacaactggtacgccgatgtcgagatggaacacggcaactataaaggcgacgacgtcatctcttcgcgcatcggcgacgagagcaacgcggccctgaccttggtgcgctcggtagaaaacggcagctggaagctgtttgccgacaccagccaacgcaaggacgacgaccgtaacggcctgggcctgtcgcgcatgtggcagttgggcaacagccaccagatcgagaccgggctggactggcatcgcaagagcgacgacagcggcctgatgcgggctttcggccagcaggaccgcgcctgggtcggcggccgtcatggcctgaccgcgcgggaccagttgagctgggaagtggcacagcgctcgttctcgacccgtgccggcgactcgttgggcagtggtcatgcgctgaagctggagcttaaccacacgctggaatttgccgggcctaactggacggtgcgcagtggtgtggattaccagaagaacaacgtgaaggatcgcaacctggattacctctccagcgatttcaaaggcccgatacgagtgcctgatgtcgcgccgcctgagccgggtgacccgatcgagttgcagaccatcccgtcgggcgacctgctgcaaagccgctacgggcaactttacgtcggcacgtcctggcgtcgcggcatccccggtgcgctggtgcgcagcaagccgcaatacacctggctggtggacatgacggcgggctggcagtggaccgaccaaaccttcaactatggcgtcaacacgggcattggtttcgaagtgctgggtgacgacgaactggccctcaccttcggctaccaatctgcgccacaaggcggggatggcaagtccggcggcacgctgggcatgagctacggcgtgcgtttcgggcgctgattacagaatctacgggagaaaaacctatgcaagcaattcgtaacctgagcctggccctgacagtgctgttcgtcgccggctgctccagcttcaccagtgaaaacagccctaacctgccgcgcaacgcgcagtgggggatcgtgccgatgatcaactattcgcagaccccgcaagctggtgagcgcagcgagcagatcctgctcagcgtactcagcagccatggcctgcaaccgcgtgtttacccgaccagcacccagggcgaacaggcgctgatggacgacaacgagcgcctgaacggtgccctggaatgggcacgtgagcagaagctcgattacgtcgtcgccggcagcgtcgaagagtggcagtacaagaacggcctggatggcgagccggcggtgggcatcagcctgcgcgtactcgacgccaacagtggtcgtgtgctctggagcaaaagcggcgcgcgcgccggttggtcccgtgaaagcctggcgggcaatgctcagacggtaatcgacaaactggttggcgcccttcgattcgagtgaacgcaatgaattctccacacatggattacagcctggcgcctcgcgccagcgggccggtgtcttggctggaaacactcctggtaacgggcttggccattggcctcggcttctggctgacccccgaagacccgttgcaaatgcacggtggtttcccctggccaatcctggcgccgctgctgttgggtgtgcgttacggttttgtgcgcggcctgttcagcgccgtgctgctggtggcggcgctgtttgccctgcgctacaccgggcatgcaggttatacccagcttgagccctcgttcatcgtcggtgtgctggtgtgcgggatgttggtaggcgaggttcgcgacctgtgggtgcgccgcctggagcgtctgcagatggctaacgaataccgtcagtaccgcctcgacgagttcacccgtgcccatcagatcctgcgggtgtcccatgacctgctggagcaacgcgtggccggcagtgaccagagcctgcgcagctcgttgctgggcctgcgtgaaaaactgcgcggcatgccggtcgaaggcgacgcattgagcgagctggccgagccgatcgtggcgatgctcggccaatacggtgcattgcgcgtggcgggtttgtaccgcgtcgacgacagtgagaaaaacctactgccccaggccttggcgatgatcggcgtgatggggccgctggagaccgatgacggtttgatccggctatgtctggagcgcggcgaactggtgagcgtacgccaggagctgatcgacgccggtaacgccgcgcagttttccgcgctgcaggcctgcatcccgttgatcgatgccgaaggccgcttgctggcgatcctggcggttcggcagatgccgttctttgcgttccaggaccgcaccttgagcttgttgtcgctgctggccggtcacattgccgacctgttgcgccgcgatccgcaagtgctgagcctgcccgatgcgcacgcccagcaattttcgttgcagctcaagcggtcgctggtagatgtggaacaacacacgttgcccaccgggttgttcgcgttcgagatgacgcgcgccaatgaggaactgtcgcgcttgatggagcgcagccaacgtggcctggacttgcacctggcggtacgcaacaaccgcgaacatcgtctgctgctggtgctgttgccgctgaccagcccggaaggtaccgaaggctacctggcgcggatcggcatgttgttgcacgagcactttggtaccgataccgacctggacagcctgggtgtgcgggtcatgcctttcaatctggagcctggctgtgatcgcaacgggctgcgtaacttcctctacaacgagtgtggcctgaatgatcagcaagtggctgtttagcggcgccgtgctgctggaggcgggcagttgggccagcctgtggctcgacgcgccgcagatgcaccaactgctggtgttcaccttcagccatggattggcctgcctgatgctgtgtggcgccgtatggctgctgttgccggcgcgctaccgggcgcctttgccgtggagcccactgttcattttcagcctggcgttatttgtgccggtgatcggtaccctgggcgtggttgcgtcgatcttcccggcgctgtacctgccgcgtaaacgcgaccagcaagcgtggcagtcggtcggcattcccggcctgccgttccgcgcaaaggcccagacacgcacgccgatcttcgccgatggtggtttgcaggacgtgctgcgccacgcgcccgatcccgatcagcgtctggccgcgctgctggcgactcgccgcatgcctggcaaggacgcggtgcccatcctcaagctagccttgggtgaccccagtgatgacgtccgtctgctggcgtactcgatgctcgacaagcaggaaagtgacatcaacctgcacatccagatggcgctggaacagttggccggcgtcggcccccgaactgccggcccggtgcacagcatgctggcgcgctggtattgggaattggcctacctcggcctggcccaaggcagcgtgcttgagcacgtgctgaaccaggccagcgaacatgccgagcaaggtctggcggccggtgagggcggtgagctgttgctgctggccggccgtattgccctggagcgcggtgaaaacgagcgggctgaggccctcttgcacgaggctgagcgaaacggtctggggccggctcagttactgcctttccatgccgagttggcgttcgaagcgggtcgctatcacgaaatccccgggctgctcgccagcctgccggaagaaacccgtcagcggccaccctttgctgagttggtgaggagctggaatgaatcataaggaaaccaccccgacggctgacatttgcctgctgctggaaggcacctggccgtacgtgcgcggcggtgtatcgagctggatccaccagatgatcctcggcctgccggagctgactttttcggtgatgttcatcggcggtcagcgttcggcgtatacctcgcggcgttatgaagtgccggtgaatgtggtgcacatcgaggaggtgttcctcgaagacgcgacgcaccccgccgatacccgtggcacaccccgcgatgccaacccgcagcagttggccgacctgtatcgctttttgcaccacccggacccgcccgagcgggaactgggagagcgcctgctcaactgcatcgccgagggccatatgaccctggatgatgtactgcgcagccgtgccagttgggaaaccctcagcgaaggctaccgccagcattgcgccgacccgtctttcgtcaactatttctggacgctgcgttcgctgcagtcgccgttgctgatgctcgccgaggcctcgcgcaagatgccgccggcgcgggtgctgcactcgatttccaccggttacgccgggctgctggggtgcatcctcaagcaccgctggaaatgcacttacctgctgagcgaacacggtatctataccaaggagcgcaagatcgatctggcccaggccacctggattgccgaaacctccgggcaggcgctcaaccgcagcctcgacgggggctcggggtatatccggaccctgtgggtgcgctatttcgaacggatcggccaactggcctacaacagcgccgacaagatcattgccttgtatgacggcaaccgtcagcgccagatcaaggacggtgccgatccgagccgcacggcgttgatcgccaatggcatcgacctgtcgcaatggtcccgtgccatggaaacccgggagccgggcattgcgcccgttgtcgggttgatcggccgcgtggtgccgatcaaggacgtgaaaacgttcctgcgtgccatgcgcggcgtgatcagtgccatgccgcacgccgaaggctggattgtcggccccgaggaagaagacccggaatacgtgagcgaatgccgcagcctgatggcgagcctggggctcgaaggcaaagtgcacttcctgggtttccagcgcatccaggacatcttgcccaagctgggcctgatggtgctgacctcgatcagcgaagcacaacccttggtgatcctcgaagcctgggccgccggtacgccggtcgtcagcagcgacgtcggctcttgccgcgaactgatcgaaggcggcagcgccgaagaccgcgacctcggcgtggcgggcaaggtggtggcgattgccgacccacaggcgacgtctgccgcgatcctcgaactgctgcgcagccccgagcgttggaaagctgcacaggccgccggcttgctgcgggtcaaccgttactacaccgaagccttgatgctgcagcgctaccgcgacctgtaccaggccgccatggagaacagttaaatggccggtattggcttcgaactgcgcaagatcctctcgcgtgactcatacaccgccaccttgcacgcctatgtgtatgcgggcctgatcagctccggcccgtgggtgctgtcgatcatcagcgtgatgctggtggggatcatcagcctgggcctgctgttgcccaacgcattggtggggcagtttctggtcacggtgacgtacctgatggccagctcattgatcctgacgggcggcctgcagttgttcttcacccgcttcgtgtccgaccagttgttcgagcgcaactacgatcagatcctgcccaacctgctgggcatattgttgatggtgacggtcggtgccggggtgttgggggtaatcgtgctggcgctcctgttcgatcaaccgctgatctaccgcgtgctggtgctgtcgaacttcgtggtgctgtgcaacctgtggctggtgatcatctttctttcggggatgaaaaagtacaaccgcatcctgctggtgatggtggtgggttactcgctgatggtcgcgtgcgcctacctgctgagcttcctgaagatgcccggcctgttgctggcgctgttgatcggtcacggcagcctgttgttcctgtacctgtacgacatcctgcgcgagtaccgtgccgagaaaatgattgcgtttgattttctcaatcgtcgcaacgtgttcctcagcctgctagtcaccgggttcttctacaacttcggcatctgggtcgacaaaatcctgttctggttcaacccaggcacgtccaacacggtgataggcccgctgcgcgcctcgatcctgtacgacatgccgatcttcatcgcctacttggcgatcatccccggcatggccgtgttcctggtgcgtatcgagaccgactttgccgagtggtacgaccgcttgttccgtgccatccgcgatggcgagaccttgcagcacattggctcgctgaaaaccgagatgaccctctccatccgccagggcctgctggaaatctgcaaagtccaaggcctgaccgtggtgctgctgttcctcttcgccccgcgcctgctggaatggatcggcatctccagctactacctgccactgttctacatcgacttgatcggtgtgagcatccaggtggtcttcatggcgttgctcaacgtgttcttctacctcgacaaacgccgcgtggtcctggaactgtgcgtactgtttgccctactcaacgcagccctgacactgctcagcatgcacctggggcctagcttcttcggctacgggtttacgttgtcattgctggtgtgtgtactgctggggctggcgcggttgtcgtcggcgctggaagatttggagtatgagacgtttatgttggcgcggtgattgggttttaggtggtgtgagaaaggcacttggcgtttgcggcaagtgccttttttgttgggggccggatggggctttatagggcgcgataacgaacctcgccacaagttgaactgcaccatggcgaggacaggccttttcagtgaggtctaccgcgcgctattgccgggtgactccaacaccttcaccacatcatcaatcaccgccttgctcatctcctgcaaataatgcgaagcccaggcataacggtccgtctcccgcgtcatcgccgcatcttctgcgagcagcttggcgacatggagcaggtcggaaacgtggtgcaaggcttcatgcagggaaacaccgctattgacgcggaacagaggttggtcggagtgaaaggagaagggggtgacgccgagggtggttaacgcagacggacttgtagcggtcattggtaaaactcccatatctggtgagagctaccacgttcgttctcaggcgaatgggtggcagctgtgcgcaggctgagaaaccggagatacaggaacccggcagacccgaaggtctcccacgcacagccgccattgcacgaaatggtgggcgaaaaaaaacgcctgcaaatcgggttttggggcgcttggtgcgcctgcatcttgccgggttctcaggcccgatcgctgaattggcagcgatggaacggagggtagcgtggtgggacgtggggagcaatcgggattattgatgggatgattttcagggcttcattagggtgtgtaggttgctactgaaattattgtttttatggctgggtcataattattggcagttcataatttggaataaaggctgaaagatgaagctttgaggctgaagtgttgttttttaagagggtagcgattggttgaagcgaggggcggggtgtgattcagctatgaacaccccagaaacagcaaagccctcacatttctgtgagggcttcgtcttatatggtgcggcaccaggagtcgaagatatataacagtatgatttttaatgtttttattattttttataggccgctatccctaaaaatatcctttggtgctcgcacgatcccttacgctttcagatcctccactcccaaaaagcaccgaaattgcacaccatgcatgcttcgtgttttcgtaggtgataccgaggacgaatgatggcattctgtacatctcatcagcgccaacccgacattacctatagggacctggatggagttgcagcagaatgaccactgaaaaaaggattttgtgaatgagccttcctcttgtaaacacgttttcgcccccctacgaaaaatgggaaacaaggcatcccaccgttgaggagatgctggcagccagcagtttccatatgcgcgtaaaggtcagactagaggtaacagttgcgaacgcttacgacgcggctatctatatgggccgcgtcggagccgacaacggcctcggggacttcatcaacgcagcgctggatgacagtcccgcccacaagcagtggcgacaagctatgccatccaaaactcctgatgcgctggcgcggtatcagaagtcatatccgaattgtgactttgccaaggtatcggcagagataaatgaaatcgcacaggtgctgagtgaaggtcaatgcctttttcatgcagggctgtggcctgactgtaccacgttagtcacggatcgtcctttatctacatcattttgtccccaggtcgccctgcgaaatgcagaccaccgaagtaaagcatacgacgcaggccgcattgatttgttcgtgctaacagtaactagcccaaaaacgaatgtctttgcttataagcgcaacggtacaaacttaggccatgaaaatgaggttctgttcgccgaaggtgccaatttgaagctggtatcgtccgaagttgttaataccgattaccctgccgcgaaacccggatttcctgataaacgaatttcggttcgcgtaatcaccgttaacgtctcatagttgagcttttcagctgatttgcacagcgtagtgctgcgcacgaaataatatgcgcgtggcattactcagcttgttgatctaacccgacatacgaaatcaactagggcagggcaatgtctgtgaaaaaaattttatgggtgaagtttggctggtctgattattatcgcggcggcccggtcgacggtaattttggttggctcaacaaaaacaagggcaaaaaaaacgaaggacgggggcacgaggcactcaactttaaccctggggctgatggaacctactattgttatgttccgccccaagcaagcgagtatgcaccgtcaaacgatgatccaaatggctggacagtgatttgcctcgcgaaaaatccaaagcacactggcgtccatgttgtcggttggtacgaaaatgccacccttcatggtgaatggcttgatcctccagagagtctgatcaaaaagcgaggggatgctgcgcacccggcctatgactggtcatactgcatctctagcaagaccgcatacttcgttccgcctgagtaccgaactatgcccttctcagatccgtccgtgaggcagggcaaatattccttcctagaaggaccaggcatagacaccaataagaacaaaacgcgcgtactgaaacttctcaacagtcgtctgaaagcgatgagccgattcgctatccagaaccctaacgagggctcgttacccgatcccgaactcgacgcagccgatcctctaaaaggattcggtacaccggagcatcggaaaaacgtggaactggcagcagaatgcgccgtcattgagtattacaaagcaaaaggatatgcctgcgaacgcgttacgcatctaccctgtgggtatgactttgtttttaccaaaggtaaatcagtgcggcacgtcgaggtcaaaggtacatccagtcccactcctcaattctttattactcggaatgagtatggaaagggtctgttatccaatccagcatggcgtcttactatggttacctctgcactgtccgaaactccgagcataactgaatacgatgctctcgggctgaagcaagcgtttgatctagaaccctatgtatacatcggaaaatttatcccgaagtcggagagttagttagccagcctgactgatatagcccattcgctatattattgaggagcccataatcgtttaatgattttcttgactgagcaccccgataccacgtcagcatataaaactatccaccccaatgcccagttaaccccaacaggaatgggaaaggggacggatctattatccagattcaaaatgggatatatgcgcgcagtggtactagcgttgaatacaacattgacttactaacgcgtcgatatcaagccagttcccaccccaaggaaaacccgtaatggatctacacaacgagttcgaaaacagtaaattcttcaaccgggcccgtatcgatcgtcgcgccgccgacgcattggtggggttggccgctggaattacggcggatggtgtcgtgaacatatcggaagcggtttttctaaagcaatggctggaaaacaatctcgcgcatctgaacgatccggtgatcaatctgctgtattcgcgtttggcgtacatgcttcaggacgatgcgctagacgtggatgagtcccaggagttgcttaacattctgcgtggtttttctggagtggacattgagagagcgaaggtcggcggcacagttgccgttactcctacggacctgcccttcaattcaccagcccctgatttggtgtgggatggccggatgtttgtatttacgggtgtcatgagctttgggccgcgcaaggattgtcaggcgctggtcgaagaacgaggtggtttgattgggggcggtgtgagcaagaaggtgcactacctggtggtcggaagcgtgggtaatgagcagtggcgccatagtacctatgggacgaagatcatgaaggcagtggagttgcgggaggcaggagcttcgattgccattgtgggtgaggatcattggcaaaggatgctgtttggttgaggttgctgcgtttttggtgtcttgggaaacgcaggcctttctttggtgagtagatcgtcgctgggtttgatggcctcatcgcgagcaggctcgctcccaagggtttcaggggggacgtttcagaaacaacaaagcccctgcatttctgcaggggcttcgttttgtatggtgccggcaccaggagtcgaacccgggacctactgattacaagtcagttgctctaccaactgagctataccggcgtgttagggcgacgattatagcgattggcaaggttctgtaaacccctgaattctgactatttttgcagaacccgcgctttttccacgctcgcccctttttacagctggcgagtgtaggatttctcccttgccgccgaagggtctaccccggcaaaaatcttctccaaacccaaggaagccccacgtgaaacggactctctcgctgtccctcatcctcctcactgtcgcgctcgctgcgtgttcgtccaacaaacccgccaacgacccggcgctggtgggcacctggaaaggtctgcgcaccgagaccggtaaatgtcagttcctgtcgtggaccaataccctcaaacctgacggtcgttttgtgattaccttctaccgcgatgcgcagcagaccaaggtgatccagaccgagcagggttcgtggtcggcggccaatggcaggaatgagttgcgtaccgacggcgtgcgttcgccggatgtgtacacctataagctgctggacgcagacacggtgcattacgtgagtgtggcgtcggatccgaccagcgattgccaggatgactacgcgttcaccgagcgtcgtgtgcgctaagccttcagaaacgctccgaaaccgggcactcaggtgcccggttcgcgcaagcctcaactgccttctgcgcagttatctgcaaacttcttgtagtccaatacctgttgctgcccgtgggaatccaggtaggtcatgtgcgcattcacgatcccacacgctccgtttgtgtcttcgacagtggtcagcacgcgctggatatccagcttgggctgtacgtcggcgtgggcgttgacggcaaaagccagcaggctgacggcgatcaaggtgttccagttcatggtgggtatcctccgggttcaacaagtgggtgtgggcttattgagcgccctggaggtatctgcactgtgtcatgcggcgcgggttttgcttcgttgtgtagcgagaccttggctgcatacaaagcgatacatcggccgtagccgtgtgggtcatttggatcgaccgctcagccggttttcccttgaatacaggtgcggtttccgtattctgtgccgcgatataaaccgtcagtttaatcgcggtttcgtgtaggcaaattttcgagacaatgtagggcaactgaatatctgttgatgcatatgtcagttttgtgtcgtttttgtccagtcggccaagattttttgtgaaataacgatgcaagtacatgttcttaaaacgaatgggtttttcttcatgaaatcgtcgtaaaaatggcgccaggccgttcgtcggattaaattgaacttaaaacatcaaaatactgacaccatcattgtgatatcacagaatgcgcccgacaccacataactagaaaaaaccaggtcagctccttgctggcctttttatcgcctttataaagcgcaaatcaggtggggaggggcagtgagtgagtcgggcagatgacatttcaaagctattcaacaagctcggtgccaacccgagtggctatcgtgagatcgactttgtccatgagttcatcgaggacgaagtcgaggtcctggaagctcccgcagtcactccagccccgcttgagatcgaagccccctcggcgcctctgctgcgcttgctggaggaactgagccaaggcgaagccgaccacctgcagccgcccgaagtggtggaagggcgggacggccaggtgtactccgagcaatcgagccctaaagtcgtggtgttggtctcggtcaagggcggcgtcggtcgcagcaccctcacggctgcgcttgccagtggcttgcagcgcatgggccgcccggcgctggccctggatctggacccgcaaaacgccctgcgccaccacctgtgcctgggcctcgacatacccggcgtcggcgctaccagcttgcgcaacgaaggctgggaagccctgcccgagcgcggttttgccggttgccggctggtggcattcggcgccactgaccacgagcaacagcacagcctcaatcgctggttgggccaggacagcgagtggctcggcaagcgcctgtccggtctcaagttgaacggccaggacaccgtgatcatcgacgtccccgccggcaacaccgtttacctcagccaggccatgtcggtggccgacgcggtgctggtggtggtacagccggacgtggcctcgttcagcatcctcgaccagatggacagcctgctggcgccatacctccagcgcgccaaaccgccacaacgcttctacgtgatcaaccagctggacggtgcccaccgcttcagcctggacatggccgaggtgttcaagacccgcctgggtgctgcgctgttggggacggtccaccgcgaccccacgttcagcgaagcccaggcctacgggcgtgatcccctcgacccaaccgtcaacagtatcggcagccaggacgtccacgccctgtgccgcaccttgctcgaacgcatcgactcggaccttccatgaccgacactacgtcctccacgcccttcgtcgaagggcgcgccgaacagcgcctcaatggcgccatcgcgcgcttcaaccggtggcctgcggcgctgcgtacggtactggttgtcgccagttgcgtgctcggcgccctgctgttgatgggcattatcagcgcgccgctcgacctctacagccagtgcctgttcgcgggtgtgtgcttcctcgccgtgctggtgttgcgcaagatcccggggcgcctggcgatccttgcgctggtggtgctgtcgctggtggcgtcgttgcgctacatgttctggcgcctcacctccaccctcggctttgaaacctgggtcgacatgttcttcggctacggcctggtcgcggccgagttctacgccatggtcgtactcatcttcggctacgtgcaaaccgcctggccgctgcgccgcacgccggtgtggctcaagaccgagccggaggaatggccgacggtcgacgtgttcatccccacctataacgaagcgctgagcatcgtaaaactgaccatctttgccgcccaggcgatggactggcccaaggacaagctgcgcgtccacgtactcgatgacggccgccgcgacgacttccgcgacttctgccgcaaggtcggggtgaactacattcgtcgcgacaacaacttccacgccaaggccggcaacctcaacgaagcgttgaaagtcaccgacggcgaatacatcgcgctgttcgacgccgaccacgtgccgacgcgttccttcctgcaagtgagcctgggctggttcctcaaggacccgaagctggcgatgctgcaaacgccacacttcttcttttcgccggacccgttcgaaaagaacctcgacaccttccgcgccgtgcccaacgagggtgagctgttctacggcctggtgcaggacggcaacgacctgtggaacgccacgtttttctgcggctcctgcgccgtcatccgccgtgagccgctgctggaaatcggcggcgtggccatcgagacggtgaccgaagacgcccacaccgcgctcaagctcaatcgcctcggctacaacaccgcctacctggccatcccgcaagccgcgggcctggccaccgaaagcctgtcgcgccacatcaaccagcggattcgctgggcgcggggcatggcgcagattttccgcaccgacaacccgttgctcggcaaaggcctgaagtggggccagcgcatctgctacgccaacgccatgctgcacttcttttatgggttgccgcgcctggtgttcctcactgcgccgctggcctacctggtgttcggcgccgagattttccacgcctcggcgctgatgatcgtcgcctacgtgctgccgcacctggtgcactccagcctgaccaactcacggatccaggggcgcttccgtcactcgttctggaacgaggtctacgagaccgtactggcctggtacatcctgccgccggtgctggtcgcgctggtcaaccccaaggccggtggcttcaacgtcaccgacaagggcggcatcatcgacaagcagttcttcgactggaaactggcgcgcccgtacctggtgctgttgctggtcaacctgatcggtattggtttcggcgtgcatcagttggtgtatggcgatgagtccaccgctgtcaccgtggcgatcaacctgacctggaccctctacaacctgatcatcaccagcgccgccgtggcggtggcctccgagacgcgccaagtgcgttccgagccgcgtgtgagtgcgaagctgccggtgagtattatttgttccgacggtcgtgtgcttcacgggatcacccaggacttctcgcagaatggcttcggcctgatcctcgatgatggtcactccatcacccaaggtgaacgggtgaagctggtgctgtcgcgcaacggtcaggacaacctgttccaggcgcgggtggcgttcagcaaaggtacacagattggtgcgcagttcgagtcattaagcctgcgcgagcaaagcgaactggtgcgcctgacgttctcacgcgccgacacctgggccgccagttggggcgccggccagccggacacaccgctggcagccttgcgtgaagtcggtggtatcggcatcggcggtctgttcacgctgtgccgcgccaccctgcatgaattacgtatggccctgcgccgcacgccctcacaaccgcttgatacgttgatggacaagccatgacctccacagcttttttcgcgcgcgctcattcgcgcgccgcacatgcgttgctgatcgcttcgctgctgggcctgagcccactgctgcaagcggccgacaaggcagtgattgctcctgctgccgtgcaaggtgccgagaacggctacagcctgacgctcaagcaactggggcgtcgcgacagcatgaacctgcagggtgtggagtcatctgacagcgtcaacttcgacatccgtgctgaccaggttgtgacgggcgcccaactgttgctcaactacagctattcgccggcgctgctggcggagctgtcgcagatcaacgtgctggtcaacgacgaagtcgccgccagcctgccgttgccaaaagaaggcgccggcaccccgcaacaggccgtcgtgcagattgcgccgcacctgatcaccgagttcaaccgcctgcggttgcagttcatcggtcactacaccatgtcttgcgaggacccgctgcacagcagcctctgggcaaaaatcagcaacaccagcgagctgaaagtgcaggtctcgccgatcctgttgaaagacgatctgtcggtgctgccgctgccgttcttcgataagcgtgatgcgcgccaggtcaacctgccgttcgtgttcgcaactccaccggataacgctacgctggaagcagcggcgacgctgtcgtcatggttcggcgcaatggccagctaccgtggcgctactttccccacggcctacggcacgatcccggccaagggcaacgccattgtgctggtgctcagcccgaatgcggtcgacgtcaatggcgtgaaagtggcgcaagccagcgggccgaccctgagcctgatcgccaaccccaacgacccccagggcaagttgctgatcgtgtcggggcgcgacggcgccgaactcaagcgcgccgccacggcggtggcgctgggcaacccggtgcttgccggcaacagcgtggtcatcgacaaacttgaaagcctggctccgcgccgcccctatgacgcgccgaactgggtgcccagtgatcgcccggtacgtctgggcgaactggtcgagctgaaaaagctcagcgtcgcgggctacaaccctggcccgatcagtgtcgacttccgcctgccgcccgacctgttcaactggcgtgaagaaggcgtgccgctgcacctcaagtaccgctacacgccgcagcaagtgtcgaccaattcgtcgttgctggtggggctggatgaccagttcatgaagtccatgccgctgccgtcgatcaccagcctggcagacggcaagaccctgttgagcatgatgcagaaagacaacacgctgccgcgcgaagccaccgtgttgctgccgatcagctcggcgtcgccgatgtccaagctgcaactgcgctttatgtacgactacatcaaggaaggcgaatgccgcgacatcatcgtcgataacatgcgcggtaccatcgacccggattcgagcctggacatcagcggctaccaacacttcatcgctatgccgaacctgggcgtgttcaacgatgccggtttcccgttcacccgcctggccgacctgtccgagtcggccgtggtgttgcctgacacctttggcaccgacgagttgagtgcctacttgaccatcctgggccgcttcggcgagtccaccggttacccggcgaccgccgtcaaagtggtgcaagccaaggacgtgcaaagtgtggctgacaaagacctgctggtgatcgccaccggtgccgaccagcccttgttcaagcaatggcagcagtacctgccggccacggtcgatggcccgcagcagcacttcaaactgtcggacctgccgcgctacgtcagcaactgggtcagcccggacgccgaagccaacaagcacgcggccaacgccgccatcagcttcaacagcttgagcaccagcacgtggtttgccggtttcgagtcgccgctcaaggtcgggcgcagtgtggtgctgatctccagttccaggccagaaggcctgcaagccgcgaccgctgtgctgattggcggcgatcaatataaagaaaccatccagggcagcctggcggtggtgcagggcacgcaggtcagctcactggtggctgaccagcagtactacgtgggcaaactgggctggttcaagtcggtgcaatggcaactgtcgcaaaacctgggttggatgttgttgttcaccttcctgggcctggcgattgtcacctgcctgatctacctgtccttgcgtgcccgtgcaaaacggcggttggcatgatgcgtccagccgcttgggcctgggtgggcgccgcgatgtttgcgggggcagcccaggcccagacgtgtgatgcgcaatggccgctgtggcagaactatgccacgcgctttgtgcaggatgacgggcgggtgttgaactcgtccctgaaccccagcgagagcaattccgaaggccagtcctacgccatgttctttgccctggtcggcaacgatcgcgcgcgcttcgacaagctgtggacgtggaccaagtccaacatggccggcaatgacctcagccacaacctgttcgcctggctgtggggcaagaacaaagatggccagtggggcgtgatcgatgccaactccgccagcgatgccgatctgtggatcgcctatgcgttgctcgaagctgcgcgcatctggaatgtgccgcagtaccgtgccgacgcgcaatgggtgttggccaatgtggaaaagaccctgatcgtacgtgtaccgggcctgggcaagatgctgttgccggggcctgtgggttattcgtatccgggtggtttgtggcgcttcaatcccagctatcaagtgttggcgcaattgcgccgcttccacaaagaacgcccgaacggcggctggaatgatgtggccgacagcaatgcgaagatgctggccgacccccaaagcaaccctcatggctttgccgccaactgggtgggctaccgcgccaccagcgccaataccggcgtgtttgtggttgacccgtactctgacgatctgggcagttacgacgctatccgcacctacctgtgggccgggatgacggcgaagagcgaccccctcgcggcgccgatgctcaaggcgttgggtgggttgtcacgggcgacggctgcgtcggtcaatggcctaccgccggagaaggtccatgtgctcaccggcgaagtcgagaagaacaatggctactcgccgctggggttctcggcgtcggccatggtgttcttccaggcacggggcgagaccgccctggcgcaactgcaaaagcacaagctcgacgacgtgttgggcaaggccatggcccccgacgcgcccgataccgcgcagccggtttattacgactacatgcttagcctgttcggcaaaggttttgccgatcaaaagtaccgtttcgagcaagacggtacggtcacattattctgggagggcgcatgcgccgccacacgctagcccttgcgatattggccaccctggcgtccagcgccagcctggctgcaaccagcgacccacaagccttgctgatcgagcagggtaactattggcagtcgaagaaaaaccccgagcgcgccctggaaagctggcagaaactgctcagcctgagccccgagcagccggacgcgctgtatggcatcggcctgatccaggtgcaacagcagcacccggaagaggcgcagaaatacctggcccgcctgcgtgcaatttcgcccctgccgcgccaggccttgcagcttgaacaagacattgccgtcaacacccccaccaacgccaagttgctggagcaagcccgtgagctgggtgagccggttgaagatcgcgaaaaggccgtggcgctgtaccgccagattttccaggggcgccagcctcagggcctgattgcgcgtgagtattacaacgccttggcgttcactcccaagggcacggccgaagggatcgccggcctgcaacgtgtcacgcgtgagcgcccgaatgattcgatcgccgcgctgttcctggcccggcacttggcgcgtaacccgtccacccgcgtcgaaggtattcgtgcgatggagcgcctgtcgaccgacaacgacgtgggcggcgccgccgatgagggctggcgttttgcactgttgtggctcggtgcaccgaaccgtgaccaggtgccgttgttccagcagttcctggccaagcatccggatgacactgagatccgtgcgctgatgaacaaaggcattgcccagagcaagggcgatggcggctggcagcgtgatcccaagttggtcaaagcgttcaaggcgctggacgacggtgacctgaaaaccgccgagccgctgttggcggcgcgcctcgcggaaaagcccaacgatgtcgatgccctcggtggcatgggcgtggtgcgccagcagcaacagcgcttcagcgaggcggagcattacctcgggcaagccacacgcctgcctggcggcgctgcctggcaaaaggccctgaacgaagtgcgctactggagcctgctcaaccaggcacgcgacgcgcaaactgccggccgtagcagccaagcccttgacctggcggcccaagccgagcgcttgaacccgagtcgcgccgacgccgccgtggccctggccggcttccaggcccaggacaatcagttcgacgccgctgaagccacgtaccgcaaagtgctggcgcgcaaccctggcgacccggatgccttgaatggcctgatcggcgtgctgtcccaatcgggtcgcccggacgaagcgttgaagctgatcgattcggtgtcgccggccgaccgtgccaagttctcctcgacggccaagatcaaagccatgcgcgccacccagttgggcaagttggccgatcagcgcggcgacttgaaagccgcccaggcggcgtatcagcaagcgcttgatgccgatccggaaaacccctggacacgtttcgcccttgcgcgggtctacctgcgggatggccagatccgcaacgcccgcgccttgatcgatggcctgctcaaaagccagccgaaccagccggatgcgctgtacaccagcaccttgctgtcggttgagctgggcgagtggaaggcggccgacgccaccttgtcacgcattccggtcggccagcgcacggcggatatgaatgagttggcgagcgatatcgccctgcacaaacagacggacatcgctgtcgaaaccgcgcgccgtggtcagcgtcccgaggccttggccttgctcggtcgcagtgccgcgctggccggtaaaaaaccggaacgcctggcggtgctggcgtctgcctatgtcgatgtgggcgcaccggaagaaggcctgcagatcatgcaaggcgtgctggaaaagactccgaacccgaccgccgaccaaaagctgctctacgccagcgtattgctcaaggccaatcactacaccgaagccggcgatatcctgcgtgagttgcagggccaacccctgagcgacgccggacgccagcgctacgaagacctgatctttcaataccgggtcaagcaagccgacgcattgcgtgagaagaacgacctggtggcggcgtacgacatgctctcgccagccctggcccagcgacctaacgacacgtcggccattggtgcactggcgcgcatgtacgctgcgggcggcgatggcaaaaaagccatggacctctaccggccgctggtccagcaaaacccgggtaacgctcagttgcaactgggtctggcggacatcgccttgaaggggggcgaccgtggcctggcgcaatcggctgccgacaaggcattgaccctggaacctacgagtgccgaagtgctgacgtcggctgcgggtatctaccgtggcctgggtcgcaataacgaagccactgaattgctgcgtcgcgcgctggccatcgaaaacacccagcgtgcccaggcgcggtcggccctggcagacgcccagggcgtggcctacaaccccttcgtcggcttgcctggccagcgtcggcaaattaccgacctggcggtggatcgcggcaccgtgccgccgcccatcgatgcgccggccaacgtgatgccagcgccggtcgcggccactgttccgacaaatgccatggcaagcaacggctatgcgccgtcgaacaacttgagtgatccgtttgtgccgccaacgcggattgccgcgctggacaacccgaccttgagccctgcgcaacgggccctcgattcgatgctgcgtgaccgtagcggttacctggtccagggcctgagcgtgcgcagcaacaacggtgaaagtggcttgagcaaaattacccaagtggacacgccgttcgaagcgcgcatgccggtgggcgacatgaacgtggcgttgcgtgtgacgccggtgagtttgagttcggggacggtcaaagccatttcggctgcgcgttttggtgccggcacaggcgaggacaaagccaagcgagaaaacggtgtcggcctggccgttgccgttgaagacacggcgcaaggcgtcaaggcggacatcggcgtgagccccctgggctttacctacaacaccgtggtcggtggcgcgagtgtgaatcgaccgttcaccgaaggcggcaacctgcgctatggcgtcaacgtttcacggcgtcctgtgaccgacagcgtcacctcgttcgccggttcaaaagccaggatcactgacaccgatggcgaagtccacacggacaagtggggcggcgtcaccgccaacggcgggcgtgccgaattgagctacgacgaccaggaggtcggtgcctacggctatgcgtctttgcacaggttgttgggacataacgtcgaagccaacacgcgcatggaattgggcagcggcgtctactggtacctgcgcaacacgccgaccgacaccctcaccctgggcgtcagcggcatggcaatgggcttcaaggacaaccagggtttctacacctatggtcagggcggatacttcagcccgcaacgcttcttctccctggccgtgccggtgcgttgggcacagagcttcgaccgtttcagctatgaggtgaaaagttcggtgggcgtgcagcatatcgcgcaagatggcgccgattatttcccgacggaaaaggacctgcaggaatcgtttgaaaacccgaaatacaagagcagcagcaagaccggcatcggctacagcctcaacgcggctgctgaataccgtctttcttcacgcttttacctgggtggcgaagtcggtgtcgacaacgcccaggattatcgccagtacgtcggcaacgcgtacctgcgctacctgtttgaagacctgagcgggcctatgccgctgccggtcagcccttaccgttccccgtattcgaattgattgataggagtcatccatgcctgtttccgcaattgccggcctgaccctgctggtactcggcgaaagccacctgagcttcccggaccatttgctcgatccgctgcaagccaacctgacggcgcaaggcgccaaggtccacaccatcggcgcctgcggtgccggcgcggccgattggatcgtgccgaagaaagtcgactgcggcgccgaaaacctgccgggcgccaagccgcaggtgttcggcaagaacgccatgagcaccacgccggtcaaggacctgatcgccaaagacaaacccgacctcgtggtgatcatcattggcgacaccatggcctcctacccggacccgcagtttccgaaagtctgggcctggaaaagcgtgacgtcgctgaccaaggccatcagcgaaaccggcaccaagtgcgtgtgggtcggcccggcctggggcaaggtcggcagcctgtacaagaaggatgatgcgcgcaccaagctgatgtcgtcgttcctggcgaccaacgtggcgccgtgcacctacatcgactcgctgaccttctccaagccaggcgaatggatcaccaccgacggccagcacttcaccatcgacggctaccagaagtgggccaaggccatcggcggcgcgctgtcggcattgccggcggatgctgtgaagggagccaagtgatgaagcgcatttccctgggcctggcgaccttgctcgccagcgtcagcgcatatagcgccgacatcccgttgtaccccaccgggccggaaaaagactcggcgttcctgcgctttgccaacggcaccagcagcgagttgaagctggtggccgaagggtccaaggccagcctggtgctgggtggcgacaaacttgtctccgactacctgcccgtgtcgggcggcagcgcgccgatcaaaggggtgttgagccagggcggcaaaaacgctgatttggctgtcactgtcgccccaggcgagttcgctacggtgatcgcggtggctgatgccaagggcggtattcgccaactggtgattcacgagcagccggacgacttcaacgcgctgaaagcctcgctggccttcgtcaatgccgacgccgcgtgtgccgatgccagcctggaagccgtggcgcaaaaggccgagctgttcaagaacgccgccgaaggttcggtgcaacgtcgcatgatcaacccggtggaactgtcggtgcagctcaagtgcgccggtgcgcgaaccggccaaccgttgaccttcgccctcaaggccggcgagcgctacagcgtgctggcaatgccagcggctggcggtacccggttgttgttcgcgcctgacacgctcgctaactgatcgggcccgacaccaccatggtctttgcctcactcgaattcctcacgctgttcctgccggccttcctgttgatctacgcgctggctcgtccgagctggcgcaacgtcatcctgttgatcggcagctggttgttctacggctggttgagcccgctgttcctgttcctgcacatggtgttgaccgtagtggcatgggtcggcggcttgctggtggaccgctcccgtgaggacggcaaaggccgggtgcgcctgttaatcgcattgatcgtgttcaacacggcggtgctgtgttggtacaagtacgccaacatcgtcgccggcacggtgagcgaggtgatcacctggtacggcgcgatgccgctggactggcagcgcgtggccttgccggccggcttgtcgttcatcgtgttgcaggcgatttcctacctggtggatgtgcaccggcatacggtgccggtggagcgcagcttcatcaactacgccacctatatctcgatgttcggccactcgattgccggcccgatcatccgttacgactgggttcgccgcgagctgaaccagcggtatttcaactgggcgaatttctccctgggcgcgcggcgctttatgatcggcatgggcatgaaagtgctggtggccgacaccttgtcgccgctggtggacatcgccttccacctggaaaaccccagcctggtggacgcctggatcggttgcctggcgtattcgctgcaactgttcttcgacttcgccggctacagcgccatggccatcggcctgggcttgatgctgggcttccacttcccggagaacttcaaccggccgtacctggccagcagcatccaggatttctggcggcgctggcatttgtccttgtccagttggttgcgcgactacctgtacatcgccctgggtgggaaccgcgacggcgtgtggcgcacctatcgcaacctgttcctgaccatggcgattgccgggttgtggcacggcggtgacagctggaactacctgctgtggggttccgctcatggcgtggcgttgtgtgtcgaccgggcctggtcgcggtcgagcctgccgagcatcccgccggtgttgtcgcacatcctgaccttgctgtttgtgtgcctggcctggaccttgttccgtgcgccggacttccattcggcactgaccatgtacgccggccagttcggcctgcacggcatggccttgggtgacgcgatggccgtggccatgcgcccggcccatggcatggcggcgttgctgggcctggtgtgcatcatcgcgccgatctggcaggtgcgttgcgaaaagcgcttcggcacccagccgtggtttgtgctggcggcttcgctgtggccggtggccgggtttgtgttgtcgttcgcgctgatcgccagccgcgacgccgtaccgtttctgtactttcagttctaaggacgcccgaccatgcctgctcctattgcgccgacgcctccgagtgaactggccgtccgcaccagccccctggcggcctgggtgctggtgcccttcttggcggcggggctgctgtcctgcgcctggttgatggtgaagggcccgatcagctttgtgccggccaaggtcgacagcgacatgctgctgcacggcgacctgacccaccgttttgccaaggaactggccaaggcgccgatggcgatccaggccgccaacctggagcgcggcggcagctggctggcgttcggtgataccgggccgcgggtacgtcagggttgcccgggctggctgtttatcagcgacgagctgcgcatcaaccggcatgccgaagccaatgcccagaccaaggctcaggcggtgatcgacctgcaaaaacaactgggccaaaaaggcatcgacctgcaagtggtggtggtgccggacaagagccgcatcgccgcctcccaacgctgtggcctgtaccgcccggcggtgctcgacggccgtattcaggactggaccaaacagttgcaggcggccggcgtttccgcgctggacctgaccgacaccttgaagcccctgggcgccaatgcctacctgcgcacagacacccactggagcgaaatcggttccaacgccggcgcccaggcgctcgcgcagcgcatccggcagcgcggcatccaggcaacgccggagcagaccttcgacatcacccaggcgcccctcgccgtacgcccgggagacctggtgcgcctggccggtctggattggttgccgcccaggttgcagccgccaggggagtcggtcgcggccagcaccgcccatgaaaccggcggcgcaaccagcaacgccgacgacctgtttggcgacgccggcctgcccaatgtggcgctgatcggcacctcgttttcgcgcaactccaactttgtcggcttcctgcaaaaggccctgaatgcgccggtcggcaatttcagcaaggacgggggcgagttctccggggcggccaaggcctatttcgagagcccggccttcaagcagacaccgcccaagttgttgatttgggagattccggagcgggatctgcaaacgccctacgatgtgatcacgcttggtcggtaatttgacgatttgccgtttgtctaaaaaacatacagctttatcatcaaaataatgacacttttgcgcgcctgaagcagactgcttgcactagggcgaccacaaaaagacctgcggtaagcagtcgtatcagctgaccttttcacgtctttgggcttcgccgtgatgaggaattcgctatgagctttactgatggtctgcttgtgttgcttggaaaagatgtcagccgtgacgttcaggggttgaatgcgcggctgcatttttttggcagcatcccggtggatgacggcacgccgtttcccgcgcaaacccccagtgcgaatgcacagtcccagccggtagataaggctgtgcggcgtgcgtgcgtggtggcattggtgtcggtcaatggtggagtggggcgcagtaccctggccaccgcgttgagcagcggcctgcagcgcctgggtgaatcagtggtcgccgtcgacctggacccgcagaacgcgctgcgcatgcacttcggcgtcagtccgggttcgccgggtatcggcccgagcagcctgcgcaatgcgcactgggacgctctccagcagcccggctttgtcggcagtcgcgtgatcacctttggcgacaccgacctgcgccagcaagacgacctgcaacgctggctcaagcatgagccggattggctggcgcaacgcctgtccgccttggacctgagcgcccgtcataccgtgatcatcgacacccccgccggtaataacgtctatttccatcaagccctgagcgtggccgatgtggtgttggtgatcgcccaggcagatgccgcgtccctgggcaccctggaccaactcgacgtgctattggcgccgcaccttgagcgcgagcgtgcgccacacgtgcattttgtgatcaaccaactggatgaagacaatgccttcagcctggacatggtcgaggctttcaagcagcgcctaggcgctaaagagccactggaagtgcaccgcgacctggcgatcagcgaggcgctggcgtttggcaccgaccccttggacagccaggcattgaccttggccggggacgatatcaatgagatttgccggctgttgatagcgcgcagaaaacaacggtaaagcgcgcttttatacgcttgacgccagatgcttatgcacaattggttggatgcacctgtcacccaaccgccattttgtggagccgttctcatcacgctgcaactgcctgttttgcgtgcgttttattttgtgaacaaaaaatgaccagcctggcttttggcctgtagcgcagatgcctacaggctccgtaaagaatccatcaacagagttatccacaggctgcactgcgacaattttgccctctaatcgcgctcggcaagcaccatcaagttgcgcggtgtcagtgtgggatcgcagaaggtgcctacgtcgacctggtagccgtgctcgctgagaaacaatgcccgatccagcaccagccacagctccagcgggcgccgaaacagaccacgcaccaactccaggttcctgacctcggccaggcggcgccagccgtgggcctccagcgccgcccaatccggttcacctgtggataaccctttgaggtgcgccagctcccggcagtagtcggcgaagggcttgtccagccaactggcgggcagggacggcgtgggcaggtattcgtcgatgccgcgcagttcgcgttgcagttggtcgaaacccaggcgccgtgccatggacgtatcgcgttgcaagcgcacgcgtttgccggcggtgacggtttcgctcaacggcaggccgaggtcatcgatggacagttgcagggtcgaagcacggcctcgtttggacaatggctggtaagtgtcggcattgatgcggttgtagcagcacggcgccagcgccagctgcttgcagccgaccgcgctggccagttgcagcaggcgcacatgcaggtcgccacaggcgtgcagggcgacgggggtgtgttcggcgcggatcgccacatcggccatcacgtcttgcaggcgatgggtggcgggcaggccgtggtgatcgctcaaggcctggcccgccgcgatcagtgcggggtcgtattccaggcaggtcagggcttgatcggcttgcaccagccggcggcccaggtggcccttgcctgaacaccagtccagccagtgggtggtggcttgcgcaaacagcagcgcactgccgaaggcttcaatttgctcccacttgcgacctggaacatcgacattcaggcgatggcgagcgggagccaggggctgcgtcggtaacttatccacagcactgagcgcgcgagcttgcgcggcgagctgcgcaaacggcgccggtgccggcaggtcatgggggtggttgtgacagttttcggcatcgtccaacgagcgttggcgtagccattgggcgagttcggggtgctgggtttcccaaggcaagtgcagatgagtaaagggccgtggtttccacagcccttggtgctcgatcaggaacgcatccagcgcctggaagcgtgcctcaacgtccttggcaggcatcgacgcgcagccagcgttccagcagtttgaaggcgcgtaccagcacgtaggccatcaacaggtagaacaggcccgcagcgaagaagatctctaccggcaagtaggtacgggcaatgatggtccgtgccatgccggtcagttccagcagggtgacggtactggccagggcgctggccttgagcatcaggatcacttcgttgctgtacgccggcaggccgatgcgcgaggcacgcggcaggatgatgtagaacagcgtcttcggcttggacatacccagcgcacgtgcggcttcgatctcgccgggcgggatggcctggatcgcgccgcgcaggatctcggcgatataggcggcggtgtgcaaggtcatggtggcggtggcgcaccagaacggatcgcgcaggtagggccacatgaagctctcgcgcactgcatcgaactgcgccaggccgtagtagaccaggaacaactgcaccagcagcggcgtgccacggaagaagaaaatataggcatagggcagggcgctgacgtaccagcggcgtgaagaccgggcgatacccagcgggatcgccagcaacaggccggcgatcactgcaatggcgaccagctccagggtcaagatggcgccctgggccagcttgggcagccacttgatgatcacggcccagttcaggcccaggtcgaaatgcgccagccagctgtagtcgccgctcattgggtgctccttgcaaagccgcgggcggcgcgtttttccaggaagtgcatgccggtcatggccagcacggtgaggcccaggtacatgaaggcggcgaccatgaagaaggtgaagggctgcttggtgacggtcacgccgatctgcgcatggcgcatgatttcttccaggccgatcaccgatacgagggcggtgtccttcatcaggatcatgaacaggttgcccaggcccggcagggcgatgcgccacatctgcggcatgatcagccgggtgaaaatccgcaacttcgacatccccaaggcgacaccggcttcacggtggcccttgggaatggcgaggatcgcgccacggaacacttccgtggcgtaggcgccaaagcacaggcccagggcgatgaccccggcggcaaaggcgctgagggaaaggtcggggttgccgaagaactcaccgagggcacgcatcaggttgaccgtgccgaagtaaatcagcagcacccacagcaattcgggaatgccacgcacgatggtcgaatacgcaccgcccacccattgcagcggcttgtacggcgaagtcttggccaaggccccggcaaggccgagcaccagccccaggcacagggccgtgagcgccagtttgacggtcatcagcgcgccagcggcaagcgccgggccgaatccgtagagatcgaaattcatggtgttttcatatcgcggcaggcattgcaaaaagccgacgcgctcaactgagcgcgccgggcataccgttcagatcattcgatgctgaacgggaagtacttgtcgttgatcttcttgtaggtgccgtctgccttgatctctgccagggctttgttcaggcgctcgcgcagtgggtcgcccttgcgtacggcgataccgatcttgtcgctttctaccaccgggtcgcccttgaactcgtaggccgaaccgtctttgctcttgagccattcgtactgcacgtacttgtcggcgaggatgccgtccaggcgaccggaggtcaggtcgaggtaggcgttttcctgggtgtcgtacagcttggcttcggtatccggcagcttgtcttccaggtaggtgccggccagtgtcgcgcgttgtgcaccgatgaccttgcctttcaggtaagccgcgtcggtcttgaagtcggcggtggctttaggcgcgatgaattgcagcttgttggagtagtacgggtcggtgaagtcgacggcttgcttgcgctcgtcggtgatcgacagcgaggacaccaggaagtcgaacttcttggcgttcagggccgggatgatgccgtcccagtcggacacatacacttcgcatttctcgactttcatcttggcgcacagggcgtcgccgatgtctttgtcgaagccgaccacgttgccgctcgcgtctttattgttgaacggcgggtaggcggcttcgatccccattttcaaggtttctgccatggccgtggcgctgaacgccatcgagacggccgcggccagaaggaattttttatagttctgcatgcatgttgctccgttagcggttgctggacatgaattgtttgcagcgcgccgaaagcgggttttcaaacacctgctgtggcgatccttgctcttcgaccaggccctggtgcaggaacaccacctcactggacacctggcgggcgaagcccatttcatgggtgaccagcagcatggtgcgaccttcttcggccagcgcgcggatcacattaagtacttcctgaaccatttccgggtcaagcgcggaagtgggctcgtcgaacaggatgactttaggctgcatcgccagggtgcgcgcgatggccgcccgttgttgctggccaccggacaattgcgcggggtaggcgtggcgcttgtcggcgatcccgaccttgtccagcagggcttcggcgacttcgatggcttcggccttgctttggccgagcacgcggcgcggggcctcgatgatgttgtcgaggatgctcatgtgcggccacaggttaaagttttgaaacacaaaaccgatttcgctgcgcaggcggttgatctgcttgccgtcggcggccatcagttcgccgtttttcgcggccttgagcttgagttcttcgccggccaccaggatctgaccctggtgtgggttttccagcaggttgatgcagcgcaggaaggtggacttgccggaaccggaggaacccaggatcgagatcacatcgccgtcgcgagcggtcagcgagatacctttgagtacctccagctcaccatagcgtttatgcaagttgcggatttcaagcgcgggcgtggcctcggccatgtggggtcctcattgtgttcgttgcaatcctgctgttgggccgccttcctggcgaggcgccaagctagcatagcgtcctgatggcagccaacagcgcggccggcggtaaaccggtggtgtgcggcggggtgtcgcatcggcacagcagcgtgtcgcgccatcaacaaccgaacaaccgtttgaacccggaaaaccgcaggctttgcgtaaaaaagggcgcgatggtgccagctttggccgggtgttggaagggttaaccgggcaaacggtgcatatcagcccttttgtggggcgtcacgtactttttgtgtgtgtttatggtgcgtttattcgtcttcaatgtgggtcgcacggtaacgctatagcggaatgccattgttctcaatgacttgcgatggttgttgaatcgtcctacagcccgcgtcaatcgcggctctgtaacattttggcgcaaatcttgcgtaaaaaataaagaacgccctgttggtttcttttcacgagaaagatcccgggccgggtggaccgttttcgcaattcctcgcaaaggtgtgtcaatgagtagtacgcaaagctccaatgacctcgaacaggggctcaaaccgcgtcacgtcaccatgctgtcgattgccggcgtcatcggtgccggtctgtttgtcggctccggccacgcgattgctgccgccggcccggccgtactgctggcgtatgccgcggcgggcacgctggtggtattggtgatgcgcatgctggccgaaatggccgtggcgtcgccggacaccggttcgttctccacttatgccgaccgtgcgattggccattgggccggctttaccatcggctggttgtactggtggttctgggtcttggtgattcctttggaagccaacgccgccgcgaccatcctgcatgcctggttcccggatgtggccatctgggcctttaccctgatcatcaccttgctgctgacggcgaccaacctgttcagcgtgaagaactacggcgagttcgagttctggttcgcgttgatcaaggtcgtggcgatcgtgggcttcgtgatcctcggcttggcggcgatcttcggtttcctgccgaccagccaggtcagcggcgtttcgcacttgttcgacacccaaggctttatgcccaacggcatgggcgctgtgttggctgcgatcttgaccaccatgttttccttcatgggcaccgagatcgtcaccatcgccgccgctgaatcgaagaacccaggccagcaaatcaccaaggccaccaactcggtgatctggcggatcggtttgttctacctgctgtcgattttcatcgtggtgtccctggtgccttggaacgatccgaccctggcggccgtaggttcctaccagaccgtgctggagcgcatgggtatcccgaacgccaagctgatcgtcgacctggtggtgctggttgccgtaaccagttgcttgaactcggcgctctacaccgcttcgcgcatgctgttctcactgggccgtcgcggcgatgcaccggctgtggccaagcgtaccaacaagagcggcacgccttactgggcggtgttgttgtccacaggcgcggcgttcctggcggtattcgccaactacgtagcgccggcggcggtgttcgagttcctgctggccagctccggcgccatcgcgctgctggtgtacctggtgatcgcagtgtcgcaactgcgcatgcgccagaaacgcacggcggcgggcgagaagatcgtcttcaagatgtggctgttccctggcctgacctacgcggtgatggtattcatcgtggggacgttgaccatcatgctgttccaggaagcgcaccgcgtcgagatcatcgcgaccggcgtgctgagcttgctggtagtggcggcggggctgattgtggcgagtcgtcgcaaggcacagcgggtgggtgcagcggtacttaactgacccaatgtgggagggggcttgccccctcccactttgttttcgcgtcaggcttctgggttgatcagcgcctgggacgccgcgacgtaatccgcctgaaacgccggtgactcgatccatgccagtgcagccgcctcatcatcggtatccgtcgcccactgtcgatactcgatcagcgctgcgaggatgaaatcggtggcttgctcttcaccttcctgctccagcaccagcgccaacagcgggtgcgccaggaatgccgcgcacaaagcctgctggctggtttcgcctgcagtgcgcatctcgatgaacatctccgttaaatccaccgactccaagtcgatgcggctgtcatcgccggcaaatgcatccggtttgactgcgacggcgcgctgggtgcggttctgcttggccttggcctttgcccggtgggcgcgtttttgctgcttgttcggcgaggccatggggttggcgtcctagggttctgagtcagggtggagtattgaagcgcaggttgggggaaatcccaagggtatccgcggccaattgaccgttttgaagccacgccaatgcaatcggccacaaccggtcctgatattcgctgcggaaaaaagcgaaatgcccgacctggttttcgccgatgtcttccggcgctatgcgcagatgcgtacgttcgctgccgtcaaaataacccagtaaccgctcaatggccgccacggtgccgaaggggtcatccgtgatgctgatcgccagtatctgcgccttcacacggctgaagggcaggtcgcccagcgctcggccgctggggcgtgtttcatatcggggagtcggcgtgctccagtcgcgcactacgccggctggcgtatcttccagccagcccaggcgcttgccggggaagtatccgcacagtgccgtcagcagcggcattaccacatgccacttggcaaacatgcgccagcgtccgcttggcgcgtaatcgcgccagtaggcgaactgcgcgcctactgtgacgattcgacgaataacggcgcccgactccccaagcccagctgcgcagccgccgaagctgtggccgactacgtcaatgggctggcctgggaactcccgttgcgcacgcttgagcatcgcctcgaaatccagcatgccccaatccgaccacgaggctttgaagtggcgcagcgagccgttgcgggattcgccgatgccacggtagtcgtaggtgatgacatctaggccgttggcgaacaggtagtcggcgaagcgagcgtagtggcggcagcgtacggaggtggcggcgttgatgatcaccaccgggcgtgcggggtcggtcctgatatggcgccaggtgaagccgcccaggatatggccgtcggcggcgggttccttgaagggggcgctgtgatcgcgtgcgggcggggccggacgcaattgtaaagaggcgtcgttcaaattcattggtttctcgaccctgatcggttcttgtttttttagtaacagttggtcagtttgccagtacttgcgctgtcatttggtggtttatcaaatgacggattggatcgcctgcttacgtcgctcgacctggagccggtatatacataaccttgcgctctttcgattcgacaagaaccaccttatgacccgcgataccctcgaacacaaccagattccgatctacctcgtcactgtgttgctggccgtcgttttcggtctgcttccactctcattcacccacgaactcagcgcactggtcacccccgccatcgccgtgctgatgtacgcgatgttcctgcaaataccgtttctcgacctgcgccaaggcttgggtaacaagcgcttcctgtccgccttgctgctggccaacttcatcctggtgcccttgctggtgtgggccttgacccaaagcctgctggggcgcccggcgttgctggtcggcgcgttgctggtgttgctgacgccctgcatcgactacgtggtggtgtttacccatatcggcaagggcgattcgcggctgatgctggcggcgacgccggtgctgttgctgctgcagttggcgctgctgccgttatacctggggttgatgctggggccgcagtctgaggtcgtggtggcggcggggccattcgtcgaggcattcctgttgttgattgtgctgccgatgattctggcagtgctcacgacttccctggcgcggcggtcatctgtcttcaacgcgtggagcagcgcctgggcatggttgcccgtacccgcgatggcgctggtgttgtttgtggtgatcggttctcaaatcacttcagtggtgcgggatatcaacctgctgttgccggtgattccggtgtatatcggcttcctgttgctggccccgttgatgggggcgctggcgtcgcggctgtttgcactccctgctgcaacggcgcgggcggtgacattcagcgcgtcaacgcgcaattcattggtggtgctgcccttggcactggcccttcccgaagaggtgcgcgggttggcggcgacggcggtgatcctgcaaaccctggtcgaactggtgggggagttgatttacgtaaggttgatcccgaagtgggtgtggcccgcaggtcggtaggcgcgggaatcttccagtctgttcaggcgctattcagcagggcagtcggcaccataagtcggcgccccttacctgacaggtcaaccgatggaccaccgcaaccgttttcgcctggaatcctcagggatttttctcttcgctctgttgttgttcaccttgggcatctgggatcagcagccccaagggtttgacgggcgttgggcgctgttcctgcaagagatgtttcgccatggcgtgagttttttccctaccacctatggtcagccctacgcggattaccccggcaccgcgaccttcttcagctatgtgtttgcccggctgttcggtgcacccaaccatctggcgaatatcctgccgaccgccctggcttctgctggcgtagttgcggtggtctaccgcttgttggtgcctgcaagccggccttgggcgctgctcacggtgctgctgaccttgctcaccacccaactgctcgaaaagtcccgctcggtctgcctggatcagatggtggcattgctctgtgtaggtagtttctacctgctgcacagcggcggacgctggaggcggcttgcagtgttcccgctgtttgtcctgggttttgcgatacgcgggccattggggttgatcgaggtctgtggtgtggtgtgtgtgtattgggcgctgggcaagcctggcgagcgcgtgaaacaggtgctgattcacggcgttgtcggcctggtgctgctggcagtgtgttggtggctgctggtgaagttggcgcgtatcagcgggggcgatgcgtttgccgatgaagtattcaagatgcaagtcggcggacgcctggatgaaaccggcgagccgttctacttctatttccagctgagtctgtaccgctacttcccggtggtgccgttggcgctggccacgatgattgccctgcgtcatcgctggcccgagcggtttgagggcgacatgcaattggtcgcgcggctgggtgcctgcggcttgatgatcttgctcgggctgtcgataccgcacttcaagcgcgcttattacatcctgcccatggtgccgatgttcgcggctgtcgcggcctatgggctgctccaggcgcaaggctggcttgcgggtgtgcgccgctgctacgaagggcttgtcgtcgcgctaccggcgttgtgtgtggttgcgatctttgtgtgtcggcatggctggcagaagcatggttactggccggacgtttcactgccgctgctgattggcgggctggtggtgctgcaagtggcggcgctgatcgcctggcatcgggtagggcggttggtgtggctcagcctgatcgcgttgatggcgcagtgggtgttgttggtcactgtggtagagccgtccaaggatatgcagttcgatacccgcaagtttgtcggccaagtggaggcgctgcgtgccacgcagccggggccgctggtgttcatcaatctcggccgggacacctgggcggtgcgctacatgatgaacctggatcacgatgagcagcccgtatttatccgcagcaatgagcttgagcggctgggcaacttgccccgcccggcctgggtgatcgtcgcgcgcaaggaaaccgcgctgttgcagggaacgcctgtggaacacctggcgccaagcttcgaagggcggttgaacgacaacccgctgatggtgtttttgctggagtgaatcagcacggacttcctggtctggggggggcgtgtgatgggcggagcgagccaggccttctccaagtgaatgcggttcccgataaaggaagtattcagtgatgcgttgggctactgttgcctgcgcaaaattcactgacgcacattttcaaggattgaaatgaaagccacatttctcgtgttatccgccttccttctgctgctctgcggctgcaccacgccgctgacctctgacatgtccagcccttcaattgccgacaccaaaacggtggtgttcggcggcaagacgttcgtcttgaaattccagaagccgggtttgtgggagtatttccccgcagaggaaagcatcgatgcctggaatgaaatggtggactttaccgtcgtccctcgcgagatgaaccgcttcaagcccctcgacctcggcaagcgcgccatccagctccaccagcaagaaaatccgaacatgccggcgatcctgctgaccgacaataaaaccggaatcgattattcgatgatgttttatcccacgtcattgcgtaaagacgggcaattctcggaaatcagttatttcaagtattacagggacggcaccaccgggcagaccatcatctttcactttgccaggaatatcccaaggtcgagcaatccctcggaaagcgcgatagagaccggccgggaaatagtgccgctgatagaagcgttcccgctgtatcggccctgatgccgttgagcgggcagcacgaatcgattcccaggcggtgattgccggaaaagcgtctacaggattttttggggggggatcgcacccactggtacgacgtaggcgtgcagttttgaagccctgaaacgagaaaacccctgagacctttcggaatcaggggtttcggtatttggtgcccagagacggaatcgaaccgccgacacggggattttcaatcccctgctctaccgactgagctatctgggcaacggggcgcattaaacgggtttttcagggggtcgtcaagcaagttttcgaaaaatatttaattattaccgtcgcttacgtgctgaccccggtttttgatcaattattgagcaggcggcacgtagccgtcggccttggcgtattcctcgccggaaaagaacttgtccatctcgcctgccaggtatttgcgatcttcggcgttcatcatgttcaggcgtttttcgttgatcagcagggtctggtgtttcaaccaatcgccccaggctttggcggagacatgttcgaaaatgtcctggcccttggcgcccggatacggagggcgttccagtccgggcaattcttctttgtacttgcggcacatgatggtgcgggtcatgacgacactcctgcattcaatacgtcggccgcgcgcttcagcagttttttcaccggggcagcaaggcccaggcgcggcggggtggcgaggttataccagagccagtcggcctcggccacgtgatggacggtttcctcgacctggatcaaccagggttcgatggcgagttggaagtggctgaaggtgtggatcaaccccggcagttcctgttggttgcccagttccagcgcgtgctggtgggccaggtgttccaggtcttgcaggtcatccagctccggtaaactccacaggccgccccacagcccggtggaagggcgacggtaaagcaggatcgcgccctcggcattcgccagcatcggcatcagcgtgcgcttttgcgggatggtcttgcgcggcttggggatcgggtagcgcgtctccaggccgagcatgtgggcttcgcagcctttttccagcgggcacagcaggcaactgggtttgctgcgggtgcagagggtggcgcccatgtccatcatcgcctgggtgtaggcgttgacgcgggtctggggcgtgaagcgctctgcggtggcccacagctgcttggccaccttgggttcgcccgggtagccctcctgtgcggtaaaccgcgccagcacacgcttgacgttgccatcgaggatcggcgcacgcaggcccatgctcaggctggcaatcgcgccggcggtggacaggccaataccgggcagctcggtgagcttttcgacatccctgggaaactcgccaccgtactcggccacgacaatcttcgcggtcttttgcaggttgcgcgcccgggtgtagtaacccaggccggtccacaggtgcagcacttcatcttccggcgcggcggccaaggcttcgaccgttggcaatgacgccatgaagcggtcgaagtaattgagcaccgtgctgacctgggtctgctgcagcatgatctccgagacccacacccgataaggcgtgatgccctgttgccagggcaggtcatggcgaccgtggcggtcgtaccaattgagcacggcctctgaaaactgctcgtttctcatcgcttgaacaggcccttcaatgcatctttcaactgcgggttcaccttgtcgagcttctcttccagtttgtcgctgagcttgttgccggccgccttgatggcgacctgggtcaagccgtccttgtccaggcggcaggccttggcccccagctccagcgggccacggcagcgcagcggcacttcgatgccctggaagttggagccgacctggcaggcagggtccggcgtttcgcgctggtcgccctcgacaatgatgccgacgcggtagtccatgcccagcacgcgcaagtccacatcaccgttaccgttgacggtcaggcccgggatgcgcactttcaggtccgggttgctggctacaccgttacggaaggccaggttgcctttcagctcctggaacggcgtgtccttgcctggcggcgtgctgctcagggtcttgcggttgagcagggcaatgccggtgcacagttgttgctcaaggttggcgttgagcagcacgccgttgttgatcacaaagctggcggtgccgttgaggctgtcgatcagggctttctggctgttgccgcggcctgtgaggttgctgtccagggtgatctggcccttcaccggcgggttctgcccctgggcctgcaggatgcgctcgaccggcacctgcttgatccggctttgcagcgccagcacaggaatatcctgacgcacatcgaggctgccgttggcctggaaggtgccgttgtagaggccgccgctcaaggtctcgagcttgagttggccatcgatgccggacgccttgagcgccgcattctggatcggcaatttgctcagggtcagttgaccgaaggcgaggtcggcatccacgtcgagcgtgcgcaggcgcgtcaatggcagcagcttgtcggtgctccaggcgcctttggtcggcgcatcgggcaatggtgtggtgccgccggcggccatggcgccggcttcgctgttctgcacctcggcctggcgtgcggcgcttgcacccttggcggattcggacttggccggcaggtagttgtcggcgttgaacgtatcgcccttgagctgcacgcgcagggactgtttggcgaaatcgtccaccgccaggcgaccggtgaaggtgctgccgtcgagtttcaggttcaggtcttccagtgccaggctggtcggggtgcccttgaggcggctgaccagttcaaccttgctcaggctgccctcggccatcggtggcagggggtggccgacgctgtcgaggaacttggccaggtcgaactgggcaatggacagtgcgccgctaagctgcggggtcttgtccaggtcgttgaccttcagctcgcccagggcgcgcaactggttggccgagagtttcaggttggtccattcggcgatattggccgcctggtccaccagcaattggccctgggtggagaaggtcacggtcttgccttgcagcggctcgcccgtggcttcgccggtgatcttcatgtcttccagctcataacgcttgagggcgcgctggatgcgcaggttgccattgagctcggtcttgacgcgcatcaccggctggttggtgccgaagaaggcagtgagtttcaccgggatactggcaccttcgtgcacagcgccggcgctcagctggatgctttcggcgctgaactgcttgccggtctgctcgtcgttgtattcgatgcgggcgttgttaatggtcaggctgtcgatgtccagccggataggtttcgagggtttctccggctcgggctcggcggcctgttccacggcagcgggtgcgctagcgctcggctcattggcgttcttgccgatgtcttcccaatcgccgtggccttgtttgtcgcggttcaggcgcaggttgaggccttcgacacgcacatcgctcatctgcacttcacgacgcagcagcggtaaaacccgtaccgacaggccgagcatctgcaagtcggcgaacggtttggttgggttggtcagggtcgccacgctggcttcgtgcagttccagcccgagccaggggaacaggctccagccgatatcgccattgagcgtcagctcgatgtgggccttgtcgcgggcaatctggcggatctcgtctttatagtcgttgggatcgaagaggtgggtcagggcaaagcccagggccacaatgatcagcaacagcccgagaagtaccagacccaggattttgccgaacgctttcatgggcgagtccttgtatgtcgatttcaaaatttagccgcagagtataacgcccgacggcctgcgtcagtgccccgatcgttacattgtatccagggggcgggaaacgggtttttgacgtcaaacaaagcagatttcctgaaaaaggtgatggcagtttggtttttctgtcatccacagatgctaatctctgcatgttcgtccgccttctgcgacttaacgtcgcgcctaaaacggagcttcactcaacaaaacggccacgctttgcgtgcaaggccgagggagagagcgcctgacggacacatactaacaactgggggaaacaccaatgagcactagcactgcggcagcttcatctgccgcgcagcctgcgttcctgtccaaggaacgcattatcgccaagcccggcttcaaccgctggctggttccgccggccgccttggccatccacctgtgcatcggcatggcctacggcttctcggtgttctggctgccactgtccaaagcgctgggtatcaccaaaccggtcgcctgcgcgccggacatgagctttatcgctcaagtcttttcgtcccaatgcgactggcccatctccatgctgggctggatctacaccctgttcttcatcttcctgggctgctcggcagcgatctggggcggctggctggaacatgccgggccacgcaaggcgggcgttgtttcggcgctgtgctggtgtggcggcctgttgatttcggcgttggggatctatacccaccagatctggctgatgtggatcggctccggggtcattggcggtatcggcctgggcctgggctatatctcgcccgtgtcgaccctgatcaagtggttcccggacaagcgtggcatggccaccggcatggcgatcatgggcttcggcggtggcgcgatggtcggtgctccgttggcagcggcattgatgggccacttcgccacgcctaccagcgtgggtgtgtggcagagcttcctggtgatggccgcgatctacttcgtgttcatgatcggtggcgccttgtcctaccgcgttccgccgaccggctggaagcctgagggctggaccgcaccggcgaaaaaagccagcaacgccatgatcacccaccgtcacgtgcacgtgaacgtggcgtggaaaaccccgcaattccgcctggtatggctggtgctgtgcctgaacgtctccgccggtatcggcatcctcggcatggcttcgcccctgctgcaggaagtgttcggcggcaagttgctgggcctggatgtgccgttcggccaactggacgccgggcaactggcctccgtcgccgccattgcggcgggcttcactggcctgctgagcctgttcaacatcggtggccggttcttctgggcgtcgttctccgactacctgggccgtaaaaacacctactttgtgttcttcgccctgggctttgccctgtacgcgctgatcccgaacctggggcacctgggcaacgtggcgctgttcgtggcggcgttctgcatcatcctgtcgatgtacggcggtggttttgcgaccgtcccggcctacctggccgacctgttcggtacgcaaatggtcggcgcgatccacggtcgcctgttgactgcctgggcagcggctggcgtgttgggtccggtgctggtgaactacctgcgtgagtatcagctgagcatcggcgttgaacgcgctgcggcctatgacatcaccttgtacatcctcgctggcctgctggtgctgggcttcatctgcaacctgctggtgcgcccggtggcggacaagtacttcatgaccgacgccgaactggccgccgaacaggcgctgggccatgacaaaggcgcggatgcgaccacctccctggagtggaaagcagccccaggtaccgtgccgttggcgattgccgcctggctggtagtgggtattccgttggcgtggggtgtgtgggtgaccctgcagaaaacggcggtactgttccactgatgcaatacctgtagggacccgctttttgtggcgagcgggcttgccccgcgtcgggtcgcgaagcgaccccaatgaggccaacgcgttttctcggttaaaacgcgctggctggttttggggctgctacgcagcccaacgcggggcaagcccgctcgccacataagcgggtacccacatgtatgcacatgtctatccccgacattcctcgctccaactcgtcagtcttatccccttcgatgtttctgtttagcgcccgcgcccctataatggctgcctttttcgcccaatgattttgcggagctggtgatggccgaacgtaaggcgtccgtcgagcgcgacactctggaaacccagatcaaagcctcgatcaacctggatggcaccggaaaggcccgatttgatatcggtgtaccttttcttgagcacatgctggaccagatcgcccgtcacgggctgatcgacctggatatcgtcagcaagggcgacctgcatatcgacgaccaccacacggtggaagacgttggcatcacgttgggccaggcatttgccaaggccatcggcgacaagaaaggcatccgtcgctacggccatgcctatgtcccgctggacgaagcgctgtcgcgtgtggtcatcgacttctccggccgtccaggcctgcagatgcacgtgccctacacccgcgccaccgtgggcggcttcgacgtcgacctgttccaggaattcttccaggggttcgtcaaccacgcgcttgtcagcctgcacatcgacaacctgcgcggcaccaacacccaccaccagatcgaaaccgtgttcaaggctttcggccgcgccctgcgcatggcggtggagctggatgagcgcatggccgggcaaatgccttcgaccaagggcgtcctgtaatgcagacggtcgcggttatcgattacggcatgggtaacctgcactcggtggccaaggccctcgagcacgtaggggccggcaaggtgctgatcaccagcgaggccaacgtgattcgcgaagccgaccgggtggtgtttcccggcgtcggcgcgattcgcgactgcatggccgagatccgccgcctgggctttgacagcctggtgcgcgaagtcagccaggaccgcccgttcctcggcatctgcgtgggcatgcaagccttgctcgaccgcagtgaagagaacgacggcgtcgattgcatcggcctgttccctgggcaagtgaagttcttcggcaaggacctgcatgaagacggcgcccacctgaaagtcccgcacatgggctggaaccaggtcagccagaccgtggatcacccgctgtggcacgacattccggacctggcgcgcttctacttcgtgcacagctattacatcgccgccggcaaaccgggccaggtggtgggtggcgggcactacggcgtcgacttcgccgctgcgctggccgaaggctcgcggtttgccgtgcagttccacccggagaagagccatacccatggcctgcaattgctgcagaacttcgccgcctgggacgggcgctggtaaatggcccggaagccgaagcagccggtcttgaacctcacgcctgaacaggagagtgaggctaccctcaagatcaagcgtttcatggaagatcgcttcgagctcaagctggggtcgttcgaggtcgccgagatccttgaactgttcaccaccgaagtggctccgcactattacaacagggcgattttcgacacgcagacgctccttaaagaaaggttcgaaagcatcgaaagcgacctgtggtcgcttgagaaaccctgatttcccaagcattgctgaatatcgaataaggtttgccagatgctgattatccccgctatcgatctcaaggacggtgcctgcgtacgtctgcgccaaggccgcatggaagactccaccgtattctccgatgacccggtgagcatggccgccaaatgggtggaagggggctgccgtcgtctgcatctggtggacttgaacggcgccttcgaaggccagccagtgaacggtgaagtggtcaccgccattgccaagcgttacccgaacctgccgatccagatcggtggcggtatccgctccctggaaaccatcgagcactacgtcaaggccggcgtgagctacgtgatcatcggcaccaaggcggtgaaagatccggcgttcgtcgccgaagcctgccgcgcgttcccgggcaaagtgatcgtgggcctggacgcgaaggacggttatgttgccaccgacggctgggctgaaatcagcaccgtgcaagtgatcgacctggccaaacagttcgaagccgacggcgtctccgccatcgtttataccgacatcgccaaagacggcatgatgcagggctgcaacgtgccgttcactgctgcgctggcggcggcgacgaagatcccggtgatcgcttccggcggcatccacaacctgggtgacatcaagtcgctgctggatgccaaggcacccggcatcatcggcgccatcaccggccgggcgatctacgaagggaccctggacgtcgccgaagcccaggcttactgcgatgcctacaacggctgaggactgaccatggcgctggccaaacgcatcatcccttgcctggacgtcgacaacggtcgcgtggtcaagggcgtcaagttcgagaacatccgtgacgccggcgatccggtggaaattgcccgtcgctacgatgagcaaggtgccgacgaaattacctttctcgacattaccgccagcgtcgacggccgcgacaccacgttgcataccgtcgagcgcatggccagccaggtgttcatcccgctgaccgtgggcggtggcgtgcgtaccgtgcaggacatccgcaacctgctcaatgccggcgcggacaaggtctcgatcaacaccgcagccgtgttcaaccctgagttcgtcggcgaagccgcgcagcacttcggttcgcagtgcatcgtggtcgccatcgacgcgaagaaagtctccggcccgggcgaaaccccgcgctgggagatcttcacccatggcggccgcaagccgaccggcctggacgcggtggagtgggcgatgaagatggaaggcctgggtgccggtgaaatcctgctgaccagcatggaccaggacggcatgaaaaacggcttcgacctgggcgtgacccgtgccatcagcgatgcgctgggcatcccggtgattgcctccggcggcgtcggcaacctgcagcacctggctgacggcgtgatcgaaggccacgccagtgcggtgctggcagcgagtattttccactttggcgaatacaccgttcccgaggccaaggcctacatggcggcgcgcggtatcgtcgtgcgctaaacgctgctggacagcatggcaggccagaggcactctctgcgcttgccatggattccggtaactttcatgttcaagcacctgctgctcgccctcgccagtacgtccctcctgttgaccgctccggcccacgccgaagaaccgtccgacgcctccctggtgttgctgacggaaaatttcccgccctacaacatggcgaaaaacggcaagaacttcgccaaggacgagaacatcgaaggcatcgccgtggacatcgtgcgcgaaaccttcaagcgggcgggcatctcctacaacctcaccctgcgttttccctgggagcgcatctataagctcgccctggagaaaccaggctacggtgtgttcgtgatggcgcgactgccggaccgtgaagcgctgttcaaatgggtcggccccatcggtccggacgattgggtgctgctggccaaggccgacagcaagatccaactggacgacctcgaacacgcgcgccgctacaagatcggcgcctacaagggcgatgccattgcccagaccctggagaagcagggcctgaaccccatcgtcgtgttgcgcgatcaagacaacgcgcaaaagctgctggatggccagatcgacctctgggccaccggcgaccccgccgggcgttacctggcacgtcaggtgggtgtgaccgggctcaagacggtgctgcgttttaacagtgcccagctctacctggcattgaataaagacgtgccggacgatctggtggcaaggctgcaggcggcgctggaccagttacgcaaagacggtcacgtcgaggagatcatggcgcgctacctctagcgctcaacgcggtttgagcaaatcgacccgcaatgtcgacggttggtcggcctggtcgaaggcataggtgcagaccttgaccggctgatgattcacgctgaccaggcgcacgaacttatcacctgccccctgcggcgcgtcattaagtgggtacacgatatcgatcggctcgtcgtcctcctcctcgggtacatgagggtggggaatgggcaggtaatccaccgggcgcaggcaatcggtcgtggcagccgggccgtatttgtaggtgtagcggctcatgaacggcggtgccaacttccaggccagggtgtagccctgcagcgtgtaagggtcgaggaggatgctcaggtcgggagtgcgcgccgggcccggctgggctagttctaccgcaagggtcagggcattgcgcatcatgccgctggtagctgggtgttcggcggaatcgaccccaatgatgcacagcatgtgcatcccggtctgcgggcctatggcgtcgttgatgcgtgcgccgcgtgcgtcaatcggtgcgctgtacagcgccgggttttcgcattcggcggcacggcgggtggttttgtagcgataaaacggcgtgttcaccttgaacgccaggttccaggtcggggtgatgtccttgccgcgcccgcccggttttttcacgtagtactgctggataggctcgggattctcaaaggtaatgctggtggtaggaaaaagatcgcactgttctacatccgcttgcagaacaccggccacaaaacaccggttgagaaacgtgaccgggctgccgtagttggtgtcttcatgccagctcggcgtgccgtccaggatctcgcacggcgcatcacgttggcatttatgttcttcggactggccggcggtgctggtgctgagaataccgaacagcgtgttggacgctcggtccagcaacgggccgccaaagctgccaaggcgtacgcccttgcactggttcttcatggtgattcgccacacgaaaggttgctccaccagttcgcgcgaggtttgttgggtgcacgcggaaagatgcaaggtgtcccacgccggcgccgcgagtgccaggatgtcgttgccgtcggcgggcacttccttggccagttttaccggggttatgccgttgttgagcaggctcgacaacgtggcgtccaactcgatgattgcaaggtccacgccttggctgctgccccacttcaaggtcttgagcgggtaggtcttgatgcgttcgagggtgtcgtcgaagtagttgaaactgatgctgcctttcatcggcagatctttttgcacgacgccattcacgcggtgcaggcaatggctgctggtgaccacgtaagccgggccggactggccggtttcgtcgcgggtgtcgagcagcgtggcggtgcatagggtctgggcttcgttgcgaatacgaccgacgccagtccaatgggcgtgctggtgctgcgcattggtgagcattttgggtgggctggcgttggcaaggccttcaccgtagtcctttggtgccgcgacaagcaggctggaaaggctgctgatcagcagccctgtaatcaagggatggaatgtgttcatggagtgtcctgaaagcgtgagcgtgaggctcgactattcaggagtgccgggtaggcaggtcggtagctatctagtacttgccgtttttgccatgtccagccatggcctggttgctgcgcacgctgatcatcaacttgatatcgatccagtcgatgccctgggccttgagcttgggcaactcgcgttccagcaccgccagtgtctgtggatacgggtggccgatcatcaccgccgaaccctgtttgtgcgccagcttgattgcagtctgcaactgcgtggtaatcgccgcttcggtgcgttcgtcgtccaggaagacgtcccgcgagacgctggccaggccgatcttctgcgcctctgcggcggcgaccgtcttggcgctggtgcggctgtcgacaaagaacttgttgcgtcgttgcaactcgcccatcaaccaggccatggcttggggctgcgcggtcatgcggctgcccatgtggttgttgatgccggcggtatagggcactgccttgaaggcagcgtccaggcgcctgccgagttcttcgatgggcagctccgggtgccaggcgaaagggccggtggccgggtccatgggcatgtgcaggatcacgatcttgccggctttgtgcgcttcgcgggcgaattcggcggcgtggggcgtgtcgggcatgatcgccgtggtcactggcccgggcagggccagcacgcgacgatccctgggcaggttttgcccgaggtcgtcgatgatgagggtcaggtaggctttttgaggctcgccggccggggtcgcatgggcgaccccggccaggctgcacagcacagcgatgatcagggcaaaacgcatatcaacggctgcgcgtgatgctcaagcccttgagcaggctcagcgcctgggcgagttggtagtcatcgtcctgcggcatcggcttggctttcttgccgctgccggtgggctggtcggcgccgccgttgccattgcccaggtggccttgcaggtcggcctccttgtagtactcgctgtcgatctcgttggtgatcttggctttgcgcacctcgatgtccggcacgatgccctgggcctggatcgagcgcccgtttggcgtgtagtacagagcggtggtgatcttcagcgcacgctcgttgttcagcggcaatacggtttgcaccgagcctttgccgaagctggtggtgcccatcagcacaccgcgtttctggtcttgcagggcaccggcgacgatctccgaagccgaggcgctgccgccgttgatcagcacggccaatggcacgttttcgctgaggtcgttgccggtggccgagaagcgcagctcggaattggcgatgcggcccttggtgtagacgatcaggcctttggtgatgaagtggtcgaccacttccaccgccgcctgcaacacgccgcctgggttgttgcgcaggtcgagcacgataccgctgagcttcttgccgttgtccttgcgcagcttggccagggccttggccacttcgtcgccggtcttgacctggaactgggtgatgcggatgtaaccgtagcccgactccagcagctggctcttcacgctcttgaccacgatggtcgcgcgggtcagcgtcacgtcgaacgggttgccgccgtcgcgcaccagggtcagggtgattttctggccgatcttgccgcgcatcttgtcgacggcttcggtcatggtctggccgcgagtcggctggccgttgatcttgacgatgaagtcaccggcctggatgccggccttggacgccggggtgtcatcgatcggcgagaccaccttgatgttgccgtcttcggcgccgacttcgatgcccaggccgccgaactcaccgctggtgctttcctgcagctcggcgaagtcttcagggcccaggtaggcggagtgcgggtcgaggttgctgagcatgcccttgatggcattttccagcagggtcttgtcgtctacgggttcgacatacgcggccttgatgcggtccatgacctcggcaaaggtgcgcagctcgtccagcggcagcggcgccttggtggtcgcggccgtgctggccggggccgccggggcagcctggtcggcgaaagccaggggcgcaccgatcaccagggcgatcgtcagggccagcgatgtgaggcgggacaaatgctgcatgtcgaacgaactcctaatgtagatgcggccctatccttgggaacggcaccattgtgcgggatcgcttgggcgaccctgctgacgaatagcgaagtacagcgccggggtgtcctggccaccactgttacccacagtggagatggattcaccggcttttacaacatcacctgccgacttgagtaatgtctgattgtggccgtaaaggctcaaatagccattaccgtggtcgagaatcaccaataaaccggcgccccgcagccaatcggcaaacaccacacgcccaccgtggaccgcgtggacctggctgccagcggaggcgctgatcatcaccccatcccacttggcgcgggtgtcatcaccacgggtttccccaaagcgtgccagcaatcgaccatcaactggccatggaagtttgccgcgggctgaagcaaaaggcccgccgaacgactcgccggcgctggaaaccagtgggccaggcgccgcatgcgccggtttgcgcggtgccggcttatccgtagtggcggccagttcggcctcacgctggcgctttttttcggcttcttgctgggcgatcagcgctttctgccgcgcttcttcggcctcgcgtgcctggcgggccagggtttcttcgatggttttaagcactttggccaggtcagcctggtcctgctcgcgcgcctggagcttggcgtcgcgggcctttacgtcgtcattgagcttggccagcgctagttggcgctccttgcggaccttgtccagctcgctgcgctgggtgtcgagggcgactttctggtcttgcaactgggattgctgattggcgatttcctgctcgacattgaccaactggcgcagggtttcattgaagcttttgagttgctccagccgggccttgctcaggtagtcgtagtaagtgagggtgcgcgcgaatttctcggggttctgctggttgagcagcagcttgaggtattcctggcggccgttctggtaggcggcacgggcctggatcgcgatcaggcgttgctgttcaacgcgtgcgctctggagtttttttttctcagcgtcgagtcgctccagttccgactcgctcttctttaattctttttgtagctcctggacctgcttctccagcttgcccatctcggtttccgtgccgcgcaggtctttctgcaccccggatttctcttcctggagcttgccgagcagttttttcagctcggtaatgtcctgacgcgtagcgtccaactgttgttgggtttgtgcacgctcgtcggcaaacgccggttggagcaggcagacaagagcaagggtaatcaaggcgcgaagcatagaggcgggcgacaccagggaaatggacggcctagtatgcccgccaagcgcggcaaaaaaaacgcccaattcgggctgtagcgcaagataggtgccgagtggcagtggtatggcaaaaagacatgttccaaactgcgcagatccaatgtgggagggggcttgcccccgattgcagtgtgtcagccacataggtgtcagctgatctaccgtaatcgggggcaagccccctcccacattgtttttcggtgaagctggaatcagaccagaatcgaagtcccggtcatctccaccggcttctccagccccatcagcatcagcatggtcggcgccacatccgccagcacgccaccgctacgcaccttgaaatcacgcttgccgacgtagatgaacggcaccggctcggtggtgtgggcggtatgggcttgcccggtggattcgtcggacatctgctcgcagttgccgtggtcggcggtgatcaacgcttcgccgccaaccttttccagcgcgtcgacgatacggccgacgcacaggtccaggcattccacggccttggtcgcagcttccaggttgccgctgtggccgaccatgtcaccgttggcgtagttgaccacgatcacgtcgtaacgctggttgtcgatggcgtcgacgatcttgtcggtgacttccggcgcgctcatttctggttgcaggtcgtaggtggcgacctttggcgaagggatcaaaatgcgttcttcgcccgggaacggctcttcacggccgccggagaaaaagaaggtcacgtgggcgtatttttcggtttcggcaatgcgcagctgggtcttgccgttttttgccaggtagtcgcccagcacgttgtccaggctgctggcggcaaaggcggcgggggccgggatgctggcggcgtattgggtcaggcccacgtactgcaccttcggctggcgggagcgctcgaattccttgaagccgtcttcgacaaacacgcggctcagctcgcgggcgcggtcggcgcggaagttcatgaacaccacggcgtcgccgtcttcgaccttgaccggctcaccgatggtggtggctttgacgaactcgtcgctttcgccacgggcgtaggcagcttcaaggccttcctgggcggtggcggcattgaattcggcctggccgtcgacaatcaggttgtaggcctgggagacgcggtcccaacggttgtcacggtccatggcgaagtaacggcccaccaggctggcgatgcggcctttgccgagggcggcgaaggtggtgtcgagcagttcgatggacgactgcgcgcttttcggcggggtgtcgcggccgtcgaggaaggcgtgcaggtagatcttgtcggcgccgcgcttgaaggccagctcggccatggcgaccaggtggtcctggtggctgtggacgccgccatcggacagcaggcccatgaagtgcacggccttaccggcagccactgctttatcgactgccgcgcagatggtcgggttctcgaagaactcgccatcgcggatcgctttggtcacacgggtgaagtcctggtataccactcgtccggcgccgaggttcatgtggccgacttccgaattgcccatctggccgtccggcagacccacgtccatgcccgagccggagatcaggccgttgggtacggtggcggtcaggcggtcgagtacaggcttcttggccgcgtataccgcgttgtcgtggtggctttcactgtgtccgaagccatcgagaattatcaggaccaaaggtttaggcgtagtagtcatagatcctctcgtggcggtaataaaggaagacaattgaaaagggagtggcagtttaaagcgaagttccgaccacgtcaccgctttacgggggttggccccccctgacggctgtgtatacttaccgccattttaacgccctggaacctccttgatggttgatcacctgattgcatttgccactgcccactatctgctcgtgggtgccttcgtcatcctgctggcgctgttgatcgctcacgaattgagccgcggtggccgcagcctgagcacggcggagctgaccgcgctggtcaacaaggatgaggccgttgtcgtggacatccgtccggccaaggatttcgccaccggccatatcgtcggcgccctgaacattccgcaggacaagctgatcgcgcgcctggccgagctggaaaagcacaaggccaagaccatcatcctggtcgacgcccaaggccagcacgccggcacccacgcccgcgaaatgctcaagaccggtttcaccgccgccaagttgtccggtggcatcagcagctggcgcgccgataacctgccgctggtgaagtgatatgagtcaggttgtcgtgtattccagcgattggtgcccttactgcatgcgggccaaggccttgctggagaaaaagggcgtcgccttcgaagagatcaaggtcgacggcaaaccccaggtgcgcgccgaaatggcccagaaggcggggcgcacgtccgtgccgcagatctgggtcggcgccaggcacatcggtggctgcgacgacctgttcgccctggagcgcgccggtaaactcgatgcgctgctgctcgtctgactccttaaaccctaaaagaccccaagatcacaaggatctgagatgactgaccaacagaacaccgaagcagcagaagccccagctccacagttctcgctgcagcgcatctacgtgcgtgacctgtcgtttgaagcgccgaaaagcccggccatcttccgtcaggaatggaccccaagcgttgcgctggacctgaacacccgccagaaggcgctggaaagcgacttccacgaagtggtgctgaccctgtccgtgaccgtcaagaacggcgaagaagtggccttcatcgcagaagtgcaacaggctggtatcttcctgatccagggcctggacgaagcctccatgagccacaccctgggcgcgttctgcccgaacatcctgttcccgtacgcccgtgagaccctggacagcctggtcacccgtggctcgttccccgcgctgatgctggcgccggtgaacttcgatgccctgtacgcccaagagctgcagcgcatgcaacaggaaggctcgtcgacggttcagtaatctcgaacccggtgcaggaccccatgtgggagggggcttgcccccgatagcggtagatcagtcacatagatatcgactggtactccgtcatcgggggcaagccccctcccacatttgttatgtgtgttacttgaagcccagctggcgccaaccttcgtagaccgcgacagccacggtgttggacaggttcaagctgcggcacccctcgcgcatcggcaagcgcaggcgatggccgtcgggcagggcgtcgagtacctcggccggcaggcccctgctttcggggccgaacaggaaggcatcgccctcggcaaaactggcatcatggaacggccgcgaacccttggtggtgaacgcgaacagccgtgggtggcccaggctttccaggcaactggccagatcggcgtggcgcttgagcgtggcgtactcgtggtaatccagcccggcgcggcgcaggcgcttgtcgtccatgtcgaagcccagcggctcgatcaaatgcaggtggcagccactgttggcgcacagcctgataacgttgccggtattcggcggaatttctggttgaaaaaggatgacgtgaaacatgcacggctccgaaggcaaagatgcgctgcattctaccctcgaagaggacccgaggccgaagcttatgccgagggtcatgggttctttggcgattgtcggcatgatggtcggcctgatgatcggtcgcctgaccaccccggacccggtcgaactgcaacaggtcgagaccgcagcggacggcgtggtggtgtggttcaacagcgagcccaagctgcacggtgagcatatcgatggcaccgtggcgctgttgttcgacgcccagggcaaggctgcggctgggcgactcaaggtcaatgacaaagacgtgaactggcgcgtacgcaagaccgatggcggcctgttgctgaacctggtggcggctcggccgttgcgtggggagtggaagggcgagaaggccgatggccgctggcggctggagatccatctccaggaggaataaaagagggagttcccggcctgcctgtaccagggctcccaaaacggggtgaagcctcgaaaggcttcggtgttaaagagggaatccccggcctgcctgtaccgaggttcccgaaacggtgtggagcgcgatgcgattcgcatccagcgccccgggtgtaaagaggggattctcggcctgcctgtaccaaggtccccgaaactgggtagtacaggggttattgcagggcgcgtgccagagtggccaggttgtgccaaaaaaaatctgtataaaacgcaaagccccggaatacggggctttggtgcttttggttttcagggttttttcagcagcgctggagttttcggtattggatccgtgcccgatgctagttcatggtgcattgaagcggtgcacctttagccctcgtcggcctcgtcatcatccccgccatcgaccttcatccccaattccttgatcttgcgggtcaaggtattacgtccccagcccagcaatacggcggcatcgcggcggcgcccggcggtgtgcttcaaggcagtctcgatcatgatccgctcaaaggccggcacggcgctgtccagcaggctcgactggccgcgtgccagggcctggtcggcccactggcgcagcgcctgttcccagttggtcacgggtgcagagtcctgcggcaggctcaacagctccggcggcaggtcgctgatatgcacttcgcgcccggatgccatcacggtgatccagcggcaggtgttctccagctggcgaacgttgcccggccacggcaggttcttcaggtattcctcggtctcgcttttcagcagcttcggctcgacggccaactcctgggccgcgcggctgaggaagtggcgggcgagggtcgggatgtcttcgcgacggtccgacatgcgtgggatgtggatacggatcacgttgaggcggtggaacaagtcctcacggaatttgccggcgtgtaccagggtttccaggttctggtgggttgccgcgatgatgcgtacgtcgaccttgaccggcgtgtgcccgccaacgcgatagaactcaccgtcagccagtacccgcagcaggcgggtctgggtgtcggccggcatgtcgccgatttcatcaaggaacagcgtaccgccatcggcctgttcaaagcgcccgcgacgcaggttggctgcgccggtgaacgcgcctttttcatggccgaacagctcggactccatcaagtccttgggaatcgccgccatgttcagcgcgatgaacggcgaagccgcccgcgggctgtgacggtgcagcgcgtgggcgacaagctctttaccggtgccggactcgccgttgatcagcacggtgatgttggagtggctcaaacgcccgatggcgcgaaacacttcctgcatcgccggcgcttcgccgatgatttccggggtgcgggtcagggccggaggggcttcctggttctgctgttcctgggcgtgctggttggcgcgcttgaccagcgccaccgcctcgtccacgtcgaacggcttgggcaggtactcaaaggcgccgccctggtaggacgcgacagcgctgtccaggtccgagtgcgcggtcatgatgatcaccggcaggcgcgggtgctgctcgcgaatccgcgccagcaggtccaggccactggcgccgggcatgcggatgtcggagatgatcacgtcgggctgctggcgcgccagtcggctcatcactccatcggcgctgtcgaagctctgggtggtcatgccttcctgttgcaaggctttctcgaggacccagcggatagaacggtcgtcatcgacgatccagacagtttcactacggctcatgtcgatggggctccttgttccaggggcagaaagatcgagaaggtggtgtggccgggatggctctcacattcgatcagaccctggtgctggctgatgatgttctgggtaatggccaggcccagcccggtaccgtccgggcggccactgaccatgggaaagaaaatggtttcctggagttccgcaggaatccccggaccgttgtcgatgatttcgaccttggtcaccaggcgatggcgcacgtggccgatggtgaactggcgcagggcgcgggtgcgcaggctgatgcgacccaggcgcagctcattctggctgctgatggcctgcatcgcgttgcgcacgatgttgagcaccgcctggatcatctgttcgcggtcgatcagaacgtcagggatgctcgggtcgtagtcacgcaccaaggtgatgcagccctggctttcggcctcgaccagttggcagacgcgctcaagcacttcgtgcacgttggtcatcgccagggacggcaacttgttggagccgagcatgcggtccaccaggttacgcaggcgatcggcctcttcaatgatgacgttggtgtagtccttgaggtgttcctctggcagctcgcgggccagcagttgcgcggcgccgcgaataccgcccagcgggttcttgatctcatgggccaggccgcgtaccagcatcttgctggtttcctgcttggacagttgcgcttcttccttggtgatgcgcagcaggcgatcacgcggatgcacttccagcagtagcaaggtcgcgccgttgctcaggatcggcgtcacggcatagtcgacggtcagcgtctggccggtcagggcggtgagcatcgcttcgcgtttggtgaacgggtgtgcctgctccactgcctggcgcaatgaactcagggcctcggccgactcggtgaacaattcgctgatgaactgcccatggctgcgctggccgctgatggccaggagcatctccgccgccgggttcatgtactcaagacgcaagtcgtcattgagcaggatggtcgcggtggtcaggttgtcgagtagcaaacggtgcagtgcatcgctgatggtcatcaggacctcttttggagcaaggcgcgggcttgaggcacacgctgatacaaggaaaatgcaaaaaccaaaccaaggctccgaaaagaagcgtgaaagccctgaaatgggggtttaaggcgcgaaactgtggcgttctgccagcttgctcgggaagtttcgaaccaaaatgggctggacagctgggaagggtgcagcctatcgcaccaatatagtgcggttttgtgaaggttgttcaggaagtggtgaacggaccgtttccagcgcgagtgaaaatgatccgggagggtcagtgctgctctgacagcggcatgtcctgtgtgcccgcgtaaaacaccaaaagctccaccggggtgtctccggtgacgccgcgatgttcggtactcaccatctcggccagggtttggccttgcctcaaggtgcgcgtagccccactgctgcgggcctcgacggtcagctcacctgaaacgatgtaggcggcgttgggcatggggtgggtgtgccagggcaattgggtgtgcgcagggatcttcaggcgaatcagcgtgagctgcggcgggccggaggggtaggctttgtagggtgtgccatcccacgactcgctgcgttcaagcaaaacctctttctcgatctgtgccgtatcctttgcctgcgtgccgcagcccagcaacgacaagcctaccgcagcagcgatcaagcacttgaaggtgtccatggttccatcctgttcattgagtgaacgctcaggctatggctgtcggcccaggtgacgatgcaggacggttcctcaaatcaggtaggtcgaacgcagagctcggccgtggcacggatcatcgccagttgacgcagcggatcattcagcggctcatgcacggcttcggccagccattgtgggcactgcggatcggtgcgctgcggggtgaagtcagccaattgctgtagcaggcgtttttgcagttcgtccaactgcgggcggatctgtttcaccaggtccgggcgcggatcgttaggtgccttgccctggaactgccagtctgacagacgggtgtactgcaccagcttgttcgcctcgatctgcgccgcgaaaaactgctcaacggcggcaggtgccaagttgtagcccggtgcctgggcgacaacgctggcgatcacttcttgttcgcgctttttgtcctctaccggcttgtggctgtcccatttgctgagggctacctggtcggcgatctccaggcgttcggcgacgctgttgagaaggggctccagagtgggcggcgcagcactcgcactgacgctgacaaataacagagcgaacacaaatcgatgtttcaaaggcgatctcctgtgggagctggcttgcctgcgatgcgggcaactcgatgcatcaggtatacctagctgatgccatcgcaggcaagccagctcccacattttaatggggtttgcaggtctacagcggcgtcagtcagaggctaccttaacttgcgtgcttgcctacagttacgccagaatccgccggcttgtacggctggcttgtcgtctctaaggttgctcggtcgctgctcataagcgatcaggtttagtagcctgagggttaagttaagctcgtaccgcaccgttctttatggtggctgtgtgtagggcatcttcgggtgcgccggcttttgcttaacttccccggtctactaacctgcgcacagccgccaccctaacgtttagtagcgagtcgatggcggcctcacttgaggaagttaagacatgttcaagccaacccccaatccaccaccctctgtcttcaccatcgccgccgatatcgacgacgaagccttgatgatcaataccttcgaaaccctcacctcggtcagcgccctgttgctggatttatccgaggacttgggcggcaagcaccgtgacaccaccttggccattcaccaactgagtgcgttgggcacgcagatggtcggccagatgctcgaccgccatgccccgacccgctaaatcccaggcaaaaaaaagacctcccgagggaggtcttttttcgtcacgccgctcttaaggacgcagcgctaccggatcagcagctgtagtacagctcgtattccagtgggtgtacgaaggtacgcaccttgatttcttcttcgcttttcaggccgatgtaagcgtcgatgaagtcgtcgctgaacacgccgcctttggtcaggaacgcacggcccttgtccagttcttccagggcttctttcaggctgccgcacacttgtgggatctctttggcctcttcaggcggcaggtcgtacaagtttttgtcggcggcatcgccagggtggatcttgttctggataccatccaggccggccatgaccaaggcagcgaaggccaggtatgggttggctgctgggtccgggaagcgggcttcgatacggcgagcacgcgggctggacacgtaaggaatacggatcgaagcggaacggttgcgagccgagtaggccagcattaccggtgcttcgaaacctgggaccagacgcttgtaggagttggtcgacgggttggtgaagccgttcagggccttaccgtgcttgatgatgccgccgatgaagtacagggcggtgtcggacaggccggcataaccttcgccagcgaaggtgttcttgccatctttggcgatggacaggtgaacgtgcatacccgaaccgttatcgccgtaaagaggcttaggcatgaaggtagcggtacggccgtaagccacggcagtgttgtgtacgcagtacttcagggtttgtacttcgtcagccttggcaaccagggtgttgaacttcacaccgatttcgttctgaccggcagtggccacttcgtggtggtgcacttcgatgaccaggcccatgtcttccatggcgttgcacatggaggtacggatttcgtggtcgtggtcgaacggcggaaccgggaagtagccccctttgatacctgggcggtggccatggttgccgccttcaacgtcctggtcggacatccaggagccttgttcggagtagatcttgaacatggaaccggagatgtcggacttgaacttcacttggtcgaagatgaagaattctggctctgggcccacgaatacggtgtcaccgataccggtggacttcaggtattcctcggcacgcttggcgatcgcacgtgggtcgcggtcgtagccttgcatggtcgaaggctcgatcacgtcgcacaccaggatcagggtggcttcttcggtgaacgggtcgagcacggcagtgctgtcgtccggcatcaggatcatgtcggaggcttcgatgcctttccagccggcgatggaggaaccgtcgaacattttgccttcttcgaagaaagcttcatccagcgcgtcgcgagccggcatggtcacgtggtgctgagtgcctttggtgtccgtgaagcgcagatcaatccatttaacgtcatgatctttgatgagttgaaccgacttcgacatagtgtcctccgggtggcttcgggctggggtagtggagttagcccttagaatgtgggtgatgccggcgcggatactccgccatggcaacctgcctcacaagagagcaaattgcatgccagtgcgccaacatgggttttctgctccaaaaacgcccctataaaggtgcattgcgacaaaagcccaaaaatagcgcaccgcaatgtagcgcaaggacgcgtaaatgcacctctttagtgcgttgcgcttgcgatgcatattaactggttaaaccttgagcgatttccgctataatccgcgcccccctttttcagcaggcccggcgcgcgctgtttccatgaaattaatcgttaaagtcttccccgagatcaccatcaaaagccgaccggtacggacgcgtttcatccgtcagttggccaagaacatccgtgccgtgctccgtgacttggacccggctgtggtggtgaacggtgtgtgggacaacctcgagctggaaacccgtgtcaccgagcccaaagccttgaaggacatgaccgagcgcctgagttgcatgccgggcatcgcgcatttcctgcaggtcgatgagtacccgttgggcgacttcgacgacatcaccgagaagtgcaaacagcactatggcagtgagcttgaaggcaagatcttttcggtgcgctgcaagcgtgccggcaagcacagcttcagctccatggatgtcgagaaatacgtcggcagcaagctgcgtcgcgagtgcggcgccgccggaatttccctgaaagcaccgcaaattgaagtgcgcatggaaattcgcgaccaacggttgtttgtgatccacagccagcacaacagcatcggcggttacccgctgggcgccctggaacagaccctggtactgatgtccggcggtttcgattccacggtggcggcctaccagatcatgcgtcgcggcctgatgagccacttctgcttctttaacctgggcgggcgtgcacacgaattgggcgtgatggaagttgcgcactttatctggaagaagtacggcagctcccagcgcgtgctatttgtgagcgtaccgttcgaggaagtgctgggcgaaattctcggcaaagtcgataacggtcatatgggcgtggtattgaagcgtatgatgttgcgcgctgcctcgcggatcgccgaccagttgcagatcgacgcgctggtcaccggtgaagcgatctcccaggtatcgagccagacgctgccgaacctgtcgatcatcgattgcgttaccgagaagctggtactgcgcccactgatcgccagccacaagcaggacatcatcgacctggcagagcagatcggcaccgccgactttgccaagcacatgcctgagtactgcggggtcatctcggtgaaccccaagacccacgccaagcgtcaccgcgtggagcatgaagagaaagaattcgacatggcgatcctggagcgtgcgctcgagaacgccaagctggtcccgatcgatcgcgtgatcgacgaactgggccaggatgtgaagatcgaagaagtcagcgaagccctggccggccagatcgtcatcgatatccgtcacccggatgccgctgaggatgagccgctggaaatcgccggcatcgacgtacaaacgctgccgttctatgcattgaacgcgcgtttcaaggaactggataacagccgtcagtacctgctgtattgcgacaaaggcgtgatgagtcgcctgcatgcccaccatttgctcagtgaggggcatgccaatgtgcgcgtttatcgaccgagctaagagcccggggctgtttgcctgtggcctgcgtcaccggccccccgactctgccgtcaagctgtaacggcaaggcctgactctactgttaatcgctgccacgacctgtcagcacaccgaatcctctgatcgagatacacaagtgatcgaaaatctacgtaacatcgccatcattgctcacgttgaccatggtaaaaccaccctggtagacaaactcctgcgtcaatccggcaccctggagcgcaacgagctcaacgacgagcgcgtgatggactccaacgaccaggaaaaagagcgcggcattaccatcctggcgaaaaacaccgccatcaactggaacggctaccacatcaacatcgtggacaccccgggccacgccgacttcggcggcgaagtagaacgcgtaatgtcgatggttgactccgttctgctgctggttgacgctcaagacggccctatgccgcaaacccgtttcgtgaccaagaaggctttcgaagccggcctgcgtccgatcgtgtgcatcaacaaggttgaccgtccaggcgcgcgtccggactgggttctggaccagatcttcgacctgttcgataacctgggtgccaccgaagaacagctggacttcaaagtcgtctacgcctcggccctgaacggtattgccggtctggaccacaccgacatggctgaagacatgaccccgctgtaccagtcgatcgtcgacaacgtacctgcgccggctgttgaccgtgacggtccgttccagatgcaaatctcggcactggactacaacagcttcctgggtgttatcggcgttggccgtatcgcccgtggtcgcgtcaagccgaacaccccggttgtcgctatcggcgccgacggcaagaagcgcaacggtcgtatcctgaagctgatgggtcaccacggcctgcaccgcatcgacgttgaagaagcagcagctggcgacatcgtgtgcatcagcggcatggactcgctgttcatctccgacaccctgtgccacccggacgcggtagaagcgatgaagcctctgaccgttgacgagccaaccgtttccatgaccttccaggtaaacgactcgcctttctgcggtaaagaaggcaagttcgtgacctcccgtaacatcaaggaacgtctggacaaagagctgctgtacaacgttgcactgcgcgttgaagaaggcgactcggctgacaagttcaaggtatccggccgtggtgagctgcacctctcggtactgatcgaaaccatgcgtcgcgaaggcttcgaaatgggcgttggtcgtccggaagtgatcatccgtcaagttgacggcgtgaagcaggaaccgttcgaaaacgtcaccatcgacacccctgaagaatcccagggcaaggtcatggaagagatgggcctgcgtaagggcgacctgaccaacatggtgccggatggcaaaggccgtgtgcgtctggaatacaacatccctgctcgcggtctgatcggtttccgtaaccagttcctgaccctgaccaacggtgctggcatcctcacctcgatcttcgatcgctacgacaccatgaagtccggcgacatgtccggccgtcagaacggtgttctggtatcggtagaaaccggcaaggcactgacctactccctggaaaccctccaggcacgtggcaagctgttcgttgaacacggtcaagagatctacaacggtcagatcgttggtctgaacagccgtgacaacgacatgggcgtcaacccaaccaaaggcaagaagctcgacaacatgcgtgcttcgggtaaagacgaaaccatcgctctggttccacctgttcgcttcaccctggaacaggccctggaattcatccaggacgacgagctgtgcgaagttacgcctaagtcgatccgcctgcgtaagaagatcctggacgaaggcgagcgtacccgcgctgccaagaaagccaagaactgagttaactctggctgaatgaagaacgcccccggtcgaaaggccgggggcgtttttttatggctgtaggttttgtggtgactgtgccggccctatcgggggcaagccccctcccacattttgaactgtgaacactttcaagtgtgggagggggcttgcccccgatgaggcccttgagagccccacaaaacccggatcagaacttgtcgagggtcttgaacttggtctcgcgcaccacttccttcggcttgtacgcgcaataccccggacgcggcccgattttcgggtggttgcggcaggtgtccgggcgcttgtcataaatagtgcagaagcgcgtcttacgatccaggtacaggcagtcgttgttgctcatgcgctgcaaggtaaaaatctcggatttggaattgaagcgctcgacgatgccttccttctgcaagcgtttggcgatgttcttcggcgggtcgccacgctcgaattcatcgacgataccgatgcggatcaggtccttgatcttcacttcgaccggcagcgtgcagcagctggacacgcaaccaccgcacatatgcgcggaatatttctgccacgtttcaagacggtcgagttccgcggcggcgatcaattgaggcttcatcagggttccaaaaggtggggctgtatccgggcgcgcgatcataccgggattggtgattttttgaacaatattttctgggtttcagctcaaaggctgatcgggcacgacccctgcatctaattcacgcaacggtgaatgagttaaaaaactgccgaaccagcgcgtctaccgtctgtcagaccgtctaggctctagcaactccttctatctcgcccgaggtcgcaattgatgtctcaggaaccacttgcacgagaagcagaggtagccgcattccgcgatgccgtcttgaccaaactcacctacgcggtgggcaaggacccggatcacgccttcgaccatgactggttcgaagccattgccctggccgcccgcgaccagatggtcgaccactggatgaaccatacgcggcgtatctaccgcaaaggccagaaacgcgtttactacctctccctggagttcctgattggccgcctgctctacgacagcctgagcaacctcggcgtgctggagattgcgcgcgaagcgctgtccgagctgggtgtcgacctggagcgcatccgcctgctggagcccgacgcggcgctcggcaacggtggcctgggccgcctggccgcgtgcttcatggaaagcatgtcgaccctgggcattgccggccatggttatggcattcgttatgagcacgggttgttccgtcaggcgatagtcgatggctggcagcaggagcagaccgagcgctggctggatttcggcaacccgtgggagttcgagcgggccgaagtgatttacccgatcggcttcggcggcagcgtcgaaaccctggcggacgcctccggcaagatgatccaggtgtggtcgcccaacgaaaccgtgcgggccgtggcctacgatacgccggtagtcggctggcgcggcgccagcgtcaacaccctgcgcctgtggcgcgcgcgtgcggtggaagacctgcacctggagcgcttcaacgccggtgaccacctgggcgctgtcgccgaagtggcccgtgccgaaagcatctcccgggtgctttacccggccgacagcaccgaagcggggcaggaactgcgcctgcgtcaggaatatttcttcgtctccgcctcgttgcaggacttgctgcgccgtcacaagaacatgcacggctcagtactgagcctgggcgaacacgcggcgatccagctcaacgacacgcacccgtccatcgccgtggccgagttgatgcggcagttggtggatttgcacgatattccgtgggaagcggcttgggacgtcaccgttgaaaccctttcctacaccaaccacaccctgttgcccgaagcattggaaacctggcctgtaggcttgatggaacgcatgttgccccggcacatgcagatcatctacctgatcaacgcccagcacatcgattcgctgcgcgccaaaggtatccacgatttcgatgtgctgcgcgccgtctcactgatcgaagaagacaacggccgccgtgtgcgcatgggtaacctggcgttcctcggctcccacagcgtcaatggtgtatccggcttgcacacccaactgatgcgcagcacggtgttctccgaactgcacaagctgtacccggaacgcatcaacaacaaaaccaacggcattaccttccgccgctggttgtaccaggccaaccccaagctcacgtccatgttggtggaggcgctcggtccggacattctcgacaagcccgagcagcgattggtggagctggagccgtttgccgagaaacaggcgttccgcaaggcgtttgccgaacaacgtttgcacagtaagcgtgcactggccgacatcatccacgagcgcctgggcattgcggtcaacccggcggcgatgttcgacgtgcaggtcaagcgcatccacgaatacaagcgccaactgctcaacctgctgcataccgtggcgctgtaccaggcgatccgtgccgaaccgggcaccgactgggtgccgcgcgtgaagatcttcgcgggcaaggcggcggccagttaccaccaggccaagttgatcatcaaactgaccaacgacatcgcccgcacggtcaataacgacccgaccgtgcgcggtctgctcaaggtggtgttcctgcccaactacaacgtcagcctggcggaaagcatcattccggcggcggacttgtcggagcagatttccaccgccggcttcgaagcctcaggcaccagcaacatgaagttcggcctcaacggcgcgctgaccataggcaccatggacggcgccaacgtggagatgcatgagcgcgtgggtgccgagcacatgtttatctttggcctcagcgcgcaacaggtggaagcccgcaagcatgccggggagttcaacgccgggccggacatcgccgcctcccatcgattgaacgatgtgctgcaagcgatccggggcggggtgttttcgccggatgatccgggccgctatgtggggttgatcgacgggttggtcgattacgaccgtttcctggtatgcgccgacttcgattcgtactgggacgcccaggcacgggtcgaggcgcattggcatgattccaaggcgtggtggcgttcggcggtgctgaacacggcgcggatgggttggttcagctcggaccgcaccatcagggagtacgcgaccgagatctggaaagccctcgactaaacatcgctgatccaaagatgtgggagggggcttgcccccgatagcagcctgtcagtttgcagatatgtcgactggtacaccgctatcgggggcaagccccctcccacattgggcgcgcgtcgatatactgggcgccggtttgcctagggaatatcgaccatgcaatggattttcatgctgattggcttggtgctcggctggacgctcgatgagtcgttcagcgatgcgggcatcggtgcgctgttggggctgggcattggccaggcgatccgcctggcgaagctatcgtcccaggcggaccaacaggcgcgtcagttggaaaccacgcagaagtcgctgatagcgctgggtgagcgcctgcggcaattggaagtgcccacccccgcagctgccagggtttttgtcgagcccgccattgtcgagcccgcacctgtcgtcgaagcgcccgagctggtttgggagttacccgtcgagctgacgcccgtggccatggtcgccgaaccgagccagccgctgcccgatgatgtttgggctccggttccgtcgccgtcccctgaagagcctgccatcccgcgtggccccaacctcatcgagcgtgccctcagcggcgcacgcaattggctgtttggcggcaataccgtgctgcgcgtcggcgtggtgctgctgttcctcggcctggcattcctgctgcgttacgccaccgaaggcatggtggtgccgatcgagctgcgttatgccggcgtagccgctgcggcgttgggcctgctgggcctgggctggtggctgcggctgcgcaacagcaattacggcttgatgctgcagggcaccgggattgccgtgctgtacctgacggtgtttgccgcgatgcgcttgcacccgttgatcgaccccagtgccgcactcggcctgttggttgccgtcaccgtgttctcggcgatcctggcgattacccaggatgcgctgggcctggcctgcgcggcggctctgggtggctttgccgcgccaatcctgacgtccaccggcgctggtaaccatgtggcgctgttcagctattttgccctgctcaatgcgggcatcctcgccatcgcctggttcaaggcctggcgcctgctcaacctgatcggttttgtcggcacctttggtatcggttttgcgtggggcatgcgttcctacacgccggagctgctgtggagcaccgagccgttcctgatcctgtttttcctgatgtacctggccatcggcttgctgttcgcccggcgcaaattgttggagatgcgcgacgcgcccgaggatgacagccgtggtgcgttgctgcgctggtcggcggccaagggggattatgtcgacggcagcatgctgttcggcccgccgctggtgggtttgggcttgcagtttgcgctggtgcagcacctggagtttgccgcggcgttcagcgccctcggcctgggcattatttacatgggactggcgcgactgttgagcggcggtcgcgccttgttgctggcggagacgtgcctggccctgggcgtgattttcgccagcctggctattccgctgggcctagatgcgcgctggaccgctgccgcctgggccgtggagggcgccgggatcttctggctcggtttgcgtcaacagcgaccgctggcacgcgccttcggtttgttgttgcaactgggctcggcgctggcgttcctcagtgagctgcgcatcggtgagcacagcttgctgaatggcgcgccgttgggcgcgctgttgctgggtgcggcgctgctgttcagctttgatcaactgcgcaaggcatccactgagcaggtggcggattgggaacgcagaggcctgccggtgctggcgagcctgggcttgagctttttgtacctgcttgcccccttgctgatggatacccaaggcacggctgtcagttgggcaattgccgggctggcaacgttgttcgtcgggctgcgtatcggttcgcgcaccttcctgttcaccgcgttcgctgtgcaattgctgggcggcgcattgttcctgttgcgtttgcaaggtggcgacggggcggcggtgttcaatgcgggctggagcggcttgttgaccgcttcactggttggcctggcgttgatcggcggcatgctgctggcggcgcgtgacgccatggtgcgcagtgacgtgcggctgttgcgcgggttgtcggtggtgctgttggcgggcctggtattgatcaacctcgcggtgctgttcgtgctgccgtgggaaagcgccagcggtgtgtgggcggccagtggtttgctgatcatctggctgagcctgtacctgcaacaacgtgtcagctttgtattcggcctgctgctgcaagtggtcggcggcggttcgttcctgctggcggtgcccgagctgctcgggccgttgtccggtgaggggctgcgcccgttggcccacagcggtttctggacaccgatggtgctgggcctggcggcaatggtcggcgcctggcgcttgcagcgtgaaccccatgcgccggtgtttgccgcgttgaagctgcagcggttgtccgacgtgctgttggtgtggggcgcggcgtggtggacgttggcgctggctggcgaagtgttgcggtttattccgcaggaattgctgggtgcgttcctgctgggatgcgcggcgatcagcgtggcgacctgggcgctgctggcctcgcgcctcaagtgggtgtcgctgggcgtgctgtgtacgttgctgatgccggcggtgggcgtggtgctgctggtgtgcgcacatacctattaccacccggcggcgcagtacggctggctggcgtggccggcggtctttgtggtgcatttcatctcgttgcggcgtttggcgacgctcgttcccgccaaggcgctgagcgtggcccacgtgctcggctgctggatgctgatcggcatgctggcgctggagttgcgctacggtctgctcaggttctctgccgaatacaacgcctggcgctggctgggctgggcgatcctgccaagtctctaccttatgctggctgccgcgccgcgccattggccatggccggtctcggcgtacccaagggaatatcgagtgttggcggccgtgccattggcggtgctgatgctcggttggttctggctggcgaacagcttcagcgatggcaccgccaggccgctgccctatgtgccgctgatcaacccgctggacctgggcctgctgttcgcgctgctgggcgtgtatgtgtgcgcacgaagtgtcgcgccgctacgcgggccgcgtgccgagctgatcgcacaaggcgtcgctgggctttcgctgtttgccttctttaccgcgttggtgatgcgcacggcccaccattggggcggtgtgccgtttcaattggatgcgttgctggagtcgatgctggtgcaggccggcctgtcgatcgtctggaccctgatcgccctcggcctgatgatcggcggccacctgcgccatcgccgcgaagtgtggctgatcggcgcggtgctgattgcggtggtggtggccaagctgttctttgtcgaattgagtaaccgcggcggcttggcgcggatcgtgtcgtttatcggcgtgggcgggttgttgctggtggtgggctactttgcgccgcttccgcccaaacgcgccgaagcggtgttggaaactgaaggagcatcctcttgatcggtaagttgagcgtggccgtgctgggcctgtgtacgaccttgtccgtgtgggcgcaggaaacgcccgccgacttcaccacccaggtgccgctgagcgtcagtggcaacggcccttggtatcgcctggagttgccactggcggtgcaattgaacgcgcgccaggcggatctcgccgatgtgcgggtgttcaacgccgccggcgagccccaggcctatgcgttgtcgcgccaggcgtcgcagcgcaccgaaagccgcgaagttaccgatgtgaagtggttcccgctgtacgccgccgacacccagcaagccctgcccgaggtggtgatgaaagccaccaccaccggcaccctggtggaaatcaaaccctcgaacgcaccaaaacccggcaagcaagtactgcgtggctgggtgttggacgccagtgcgatcaaggcgcccttgcagcaattgagcctggactggagccgcgagcaggagggcttccagcgtttcagcatcgaggccagtgatgacttgcagcattgggacgcctggggcgatgggcaggtggcgcgcttatcgtttgccgatgagcgggtcgagcagcatgacgtgaacttgcccgggcaatcggcgcgctacctgcggctggtctggcagggccaggcggcgccgttgctgacctcggccaagctggtgagcgctacccgcagcagcgtgccgctgccgttggtgtggtcgccgccgctggcgggtaagcggctcagcgccggggaatacagttggcagttgcctgcggggctgagtctcgaacgcttgcgcatcgagctcaagcaacccaacacgctggcgcccgtgacgttatccggtcgaagggacagcaagcaggcctggcaaccattgagcaatggcttgctgtatcgcctgacccagaatggccaggacgtggtgcaggatgaactgcagttgccggggcaaacggtggccgagctcaaattgcaggtggatgagcgcggtggcggcctgggcgtcgaagcgcccgccctgcgctttgcggtgcgcgccacgcagttggtgttcctggcgcggggtgaggcaccgtttacgctggcgctgggcaatgcgtcggccaaggcggcaagcctgccgctgtcgaccctgatcccggactacaaacccgagcgcttcaagacgctggggcaggccaaggtcgccggggaagtcgcggtcacgccggttgcggtggtaggcgctgccgatgccgggacgaactggaaaaagctcgggctctgggccgtgctgctgctcggcgtggcggcactgggcgccatggcctacagtttgctgcgcaagccgccggcggcacgttaaataaagtccatgaactctattgggtttaaatcctctgataggaggaaatacgccccgactcgcgttaaactgcgcgggttttcaagccccccattctccggagccttacatgtcccgcgttaccttgagtcgctatttgatcgagcagacccgcagcaacaacacgcctgccgatctgcgcttccttatcgaagtggtggcgcgtgcttgcaaggaaatcagccacgccgtgtccaaaggcgcactgggtggtgtcctgggcagcatgggcactgaaaacgtgcagggcgaagtgcagaagaagctcgacgtcctgtccaacgagatcctgctcgaagccaacgaatggggcggtcacctggccggcatggcgtccgaagaaatggacaatgcctaccagatccccggcaaatacccgaaaggcgcgtacctgctggtattcgacccgctggacggttcgtccaacatcgacatcaacgcaccggttggcaccatcttctcggtactgcgttgcccgaacgaatacctgagccagaacgaagcgctgaacgaaaaggccttcctgcagccaggcaccgagcaggtggctgccggctacgccatctacggcccgcagaccatgctggtgctgaccctgggtgatggcgtcaaaggcttcaccctggaccgtgaaatgggcagcttcgtactgacccacgaagacatctccattcctgcatcgacccaggaatttgcgatcaacatgtccaaccagcgccactgggaagaaccggtgaagcgctacgtcaacgagttgatggaaggcgaagaaggcccgttgaagaaaaacttcaacatgcgttgggtggccgcgatggtcgccgacgtgcaccgtatcctgacccgtggtggcttgttcatgtacccacgcgacagccgcgagccatccaagccgggcaaactgcgcctgatgtacgaagccaacccgatgtcgttcctggtggagcaggcaggcggtgcgtccactgacggccaccagcgcatcctcgacatccagccggaaggcctgcaccagcgtgtggcggtgttcctgggttcgaaggaagaagttgagcgcgtgaccgcttaccacaagaagtaagctgcggcgacaagtgaccggcgttgttgtgagccggttcacccttgaagaagccccgaaacgtttcagcgttttcggggcttttttgtttttgctcatcgggaaccagacacctcttttcccttctaagcttctggcagatacccacgctgcttcgtccctccaggagtgtttccatgtcgttacgccgtctcgcgttgctggctttttgcgtgctgttggccgcttgcagcaaggtcaaccaagaaaactatcaaaaattgtcggctggcatggccaaggctgaggtggagtcattgttgggcaagccgaccgattgttccggcgcactgggtatgtccagttgcacctggggcgataaaaacagctttatcagcgttcaatatgccggtgacaaggttctgatgttttccgggcaaggcctgaagtaaaccggggcgcaagcctgcgggagaagaagaatgatgcgttttgttttgttcctttgtgccagcctgtttttggcgggctgtgccagccattctggcgatgatctgcaacccaagacagcgagcaacgtcaacctcaagcgttaccagggcacctggtatgagttggcccgattgccgatgtacttccagcgcaactgtgcgcagtccgaagcccgttacaccctgttgcctgacggcgacatgtcggtgttcaaccgctgcttgacgaccgagtggaagtgggaagaagccaagggcaccgccaccccgcaagtgccgggcaagaccgacaagctctgggtggaattcaacaactggttcacctcgctgctgccgggcgtcgccaagggcgattactgggtgctgtatgtcagcgatgactacaagaccgccattgtgggcagcccgagccgacgctacatgtggatcctgtcacgcacgccgacggtcaatgcggacacccgcgaagacctgctgagcagggcgcggcaacaggggtatgacaccacacggttgatctggcgtacgtcggacaagcagatggcgaagacttcgcaataagtctggatcaccaccgatccaattgtgggagggggcttgcccccgattgcagtgtgtcagtcagcacatctgattctgatacatcgctatcgggggcaagccccctcccaccgtttttaaccgagtaaatgcctcaagacctgtgtgaacgctcggctgctttcttcttcgccggcatgatgcccatcgcgcaccacccactctccattcaccagcacatcccgcacctgccgatcaccaccggcgaacaaccagcgattcagaatcccgtcctcggtcgccgtcgccaggtacggatcattgccgtccaggacaatccaatccgcacgcttgcccgcttccagccgcccaatcagctggcctagcgcctgcgcgccgccatccagcgcggcatcgaacagcgtgcgcccgaccatcggctgatcactgcgatacagacgattgcgccgctgatcacgcaggcgctggccatattccaaccagcgcaattcctccaccacgctcaacgacacatggctgtcggacccaatccccatgcgcccgccctgtgcgaggaaatccaccgccgggaaaatcccatcacccaggttggcctcggtggtcaggcacaaaccggcaatcgcccggctcttggccatgcgcgtcacctcatcggcatcggcatgggtggcatgcaccaggcaccagcgttcattgacgtcgatattgtcatatagccattgcagtgggcgcttgccgctccaggccaggcagtcgtcgacttccttctgctgctcggcgatgtggatatgcaccgggcaggtcttgtcgctggccgtcagcacttcgctgatttgctgcggcgtgaccgcgcgcagggagtggaagcacaggcccagcgcttgcgccggttgcgcggcgaggatcggcttgaggcgcgcttgcaggtccaggtagttttccgtgctgttgatgaaccggcgctggccctcgttcggcgcttgcccaccaaaacctgaatgggtgtagagcaccggcaacaacgtcaaaccgatcccgctgctggccgccgcctggctgatctgccgtgacagttccgtgcgatcggcatagggctggccgctgacgtcatggtgcacataatgaaattccgccaccgatgtgtagccggccttgagcatctcgatatacagctggcgcgcgatgacctggagttggtccgggttgatcttgccgaccatgcgatacatcaggtcgcgccaggtccagaaactgtcattcgggttgccggccacttcggccaatcccgccatggcacgctggaaggcatgggaatgcaggttcggcatgcccgccaacaccgggcctctcagccgttctgcaccctctgcactggcattggcctcaacgttggtcagcaagccatcggcgctgacttcaagacgtacatcattggcccatccattaggcagcagcgcgcgttcggcaaagaaagcggacatgatcaaggcaccccggtcgtgtgtttatttgtatatacatatacagacgtttgcctgctcggtaaactccggcaatctatgcatcttttccccctgcaaggattccctgtgccgactccgcccgccaactcttcgctggctgcccacatggacgaaagtccggcgcccttgtacgcccgcgtcaaacagatgatcagccagcagattctcaacggcaactggccgccccattaccgcgtgccttcggagagcgaactggtcagccagctgggtttcagccgcatgaccatcaaccgcgccctgcgtgagctcaccgccgaagggttgttggtgcgcatgcaaggcgtcggcacctttgtcgccgaacccaagagccagtcggcgctgttcgaggtgcacaacatcgccgatgagatcgcctcccgtggtcaccggcatacctgccaagtcatcaccctgggtgaagaggctgccggttccgagcgcgccgttgccctggagatgcgcgaaggcgggcgggtgtttcactcgctgatcgtgcacttcgaaaacgatattcccgtgcaaatcgaagaccgtttcgtcaacgccctggtcgcgccggaatacctgcaacaggatttcacccagcaaacgccctacgcctacctgaaccaggtggcgccgctgaccgaaggcgagcatgtggtcgaagccatcctcgccgatgcggccgagtgcaaactgctgcagatcgaacccggcgagccgtgcctgttgattcgccggcgcacctggtcgggccgccagccggtgaccgccgcgcgtttgatccaccccggttcccgccacagcctggaaggacgcttcagcaaatgagtagcgtaaaagtctggcgcgccgccgagtacgtgcgcatgccgtggaaaaacggcggcggcagtaccgaagaaatcacccgtgatgcaggtgcagggctggatggctttggctggcgcttgtcgattgcggatatcgctgagtcgggtggcttttccacctttgccggttaccagcgtgtcatcaccgtgatccagggcgccggcatggtgctgaccgtggatggcgaagagcagcgcgggttgttaccgctgcaaccctttgcgttcaagggtgacagccaggtggcatgccgcttgatcaccgggccgatccgcgacttcaacctgatctactcgccacagcgttaccacgcgaggctgcaatgggtggacggtgtgcagcggttcttcagtaccgcgcagaccgtgctggtgttcagcgttgctgatgaagtgaaggtgctggaccacaagctcggccatcacgactgcctgcagatccacggtaacaccggcctgctggacctcgccgtcagcggccgcagctgtattatcgaactgacccaactcggttaaaaaatgtgggagggggcttgcccccgattgcagtgtgtcagccagcctatcgggtactgatacaacgccatcgggggcaagccccctcccacatttgtttcccgctgttcttgatagctgtttcctgagcgcgcaccactttgttaccgaatgccccagcgtggcgcaaaaccatgctttcgcgataaccccgcccaaccactaacgcctcccgtaagaaatttcatcacgcctctacaccttgattttcaaggctcacacgcgctttccaaaaaatccaaacgcctcgccgaaaaagttggccgcttgattgcatatgcttgtatgtacaagtaaagatgtgtgcgtaagactctgcttcgcaccatccatgttcgcgcatcgatcgccgaggagtcctagcagtgaccaagcctacaaaataccgtgacgtcgaaatccgtgccgcccacggtaacaagctcaccgccaaaagctggctgactgaagcgccgctgcgcatgctgatgaacaaccttgacccacaagtggccgagaacccgaaagaactggtggtgtacggcggtattggccgtgcagcacgcaactgggagtgctacgaccagatcgtcgagagcctcactaacctgaatgacgacgaaaccctgctggtgcaatccggcaaaccggtcggcgtgttcaagacccacagcaacgccccgcgtgtactgatcgccaactccaacctggtgccgcactgggccagctgggaacacttcaacgaactggatgccaagggcctggccatgtacggccagatgaccgccggcagctggatctatatcggcagccagggcatcgtccagggcacttacgaaaccttcgtcgaagccggtcgccagcactacaacagtgaccttaaaggccgttgggtactgactgccggcctcggcggcatgggcggcgcccagccgctggcggccaccctggccggcgcctgctcgctgaacatcgagtgccagcaggtcagcatcgacttccgcctgaacagccgctatgtcgacgaacaagccaccgacctcgacgacgccctggcgcgtatcgccaagtacaccaaggaaggcaaggccatctccatcgccctgctgggcaacgccgccgaaatcctgccggaactggtcaagcgtggcgtacgcccggacatggtcaccgaccagaccagcgcccacgaccccctcaacggttacctgccggcgggctggacctgggacgaataccgcgcccgcgccaagaccgagcccgctgccgtgatcaaggccgccaagcagtccatggccgtgcacgtcaaagccatgctcgagttccagaaacaaggcatcccgactttcgactacggcaacaacatccgccagatggcccaggaagaaggcgtggaaaacgctttcgatttcccgggtttcgtcccggcctacatccgcccgctgttctgccgtggcatcggcccgttccgctgggcggcactgtccggtgacccgcaggacatctacaagaccgacgccaaagtcaaagagctgatcccggacgacgcgcacttgcataactggctggacatggcccgcgaacgcatcagcttccagggcttgccggcacgtatctgctgggttggcctgggtcagcgcgccaagctcggcctggcgttcaacgaaatggtgcgcagcggcgagttgtcggcaccggtggtgatcggccgtgaccacctcgactccggctcggtcgccagcccgaaccgcgaaaccgaagccatgcaggacggttccgacgccgtgtccgactggccgctgctcaacgccctgctcaacactgcgagcggcgcgacctgggtatcgctgcaccacggcggcggcgtgggcatgggcttctcccagcactccgggatggtcatcgtctgcgacggcaccgacgaagcggctgagcggatcgcccgtgtgctgcacaacgacccggccaccggtgtgatgcgccatgcggatgccggttaccagatcgcgattgattgcgccaaggagcagggcttgaacctgccgatgatcaagtaagccagtaccaccctgaaacaatccatcagaggttgaaccgacatggctgcaaatgacaccaccccgttgatcgaaaggcgttcgatcgactacatcccggaagccgaaagacacggtcgtctgttcagccagttcaccctgtggatgggcgccaacctgcagatcaccgcgattgtcaccggggccttggccgtggtgctgggcggcgatgtgttctggtcgttgatcggtctgttgatcggtcaactgatcggcggtggggtcatggcgttgcatgcggcgcaagggcccaagctgggcctgccgcagatgatttccagccgggtgcagttcggtgtgtatggcgcggccatccctattgtgctggtgtgcctgatgtacctgggcttcaccgccactggcaccgtgctttcggggcaggcgctgggccagttgttcggggtcagcgacagcgtcggcatcctgattttcgccagcgtcatcgtgttggtcacggtgctcggctaccgggtgatccatttcatcgggcgtgtcgccagcgtgattggcgtgattgcctttgtgtacctgttcagccgtctgatgagccagaccgatgtgggcgcgctcctgcagatccgccacttcagctggagcagtttcctgctggcggtgtcgctcgcggcctcctggcagatcgcattcggcccgtacgtggcggactattcgcgctacctgccgagcaagacctcgtcggtgaaaacctttttcgccgccggtgcaggttcggtggtgggcgcgcaggtggcgatggtgctcggcgtgtttgccgcggccatgtccaacggtcagttcgccgggcatgaagtggcctacatcgtgggcttgagtggcaccggtgctaccgctgcgctgctgtacttcagcatcgcattcggcaaggtcaccatctcgacgctgaactcctacggcagcttcatgtgcatcgcgaccatcgtcagcggctttcgtggccgcctggaggtcacgcgcctgcaacgcctggtgttcgtgctggcgattgtcggtacggcgaccctgatcgcattgctcggccagcactcgttcctgggggcgttcaagtccttcatcctgttcctgctggcgttcttcacgccctggagcgcgatcaacctggtggactactactgcatcacccgcgagcgctatgacgtaccagcgctggccgacccgaacggtcgctacgggcgctggaacctgctcggtatcagcgtgtatgtgttcggcgtgctggtgcagttgccgttcatctccaccaagttctacacaggtcccttggtggccgcgctgggtgatgtggatatctcctggatcatcggcctggtactgcccgcagcgctgtattacctgtgtgcgaaaaaatggcacggcaccgtgcccgatcaactgatcctgccaacagagcagggcgctatacccacaacaaacgggctggctgcacaggcctgatgggacgtggacagggcaggatgcctactgactgccgtaatccatttcaagattgggagcgtcacaacaatgaaaatgcataagaccctgatggctaccttgctctctgcaggcttgctggccagcgctggcgcccaggcagccggttggtgcgaatccggcaagccggtgaaattcgccggcctgaactgggagagcggcatgttgctcaccgacatcctgcaaaccgtgctggaaaaaggctacgactgcaaaaccgacagcttgccgggcaactccatcaccatggaaaacgccctgagcagcaacgacatccaggtgtttgccgaagagtgggtcggccgcagtgaagtctggaacaaggccgagaaggccggcaaagtcgtcggcgtcggcgccccggttgtgggcgctatcgaaggctggtacgtgccgcgttatgtgatcgaaggcgatgccaagcgcaagctggagcccaaggccccggagctgaaaaccatcgccgacctggccaagtacgcctcggtgttcaaggaccaggaagagccctccaagggccgcttctacaactgcccggccggctggacttgcgagctggacaacagcgagatgctgaaaagctacggcctggaaagcacctacaccaacttccgcccaggcaccggcccggcgctggatgcggcggtgctgtcgagctacaagcgtggcgagccgatcctgttctactactggtcgcccacgccgctgatgggccaggtcgacctggtcaagctcgaagaaaaacccggtgtggataaaagcgtgagcatcaaggtcggcctgtccaagaccttccacgaacaagccccggaactggtggccgtgctggaaaaggtcaacctgcccatcgacctgttgaaccagaacctgggccgcatggccaaggagcgaattgagtcgccaaaactggcgaaaattttcctcaaggaacatcctgaagtctggcacgcctgggtgagcgacgacgcagccaagaaaatcgacgcggccttgtaggtcaagcgtgcccggctaccctgaggggcagccgggcgcctggccacaacccactggatcgagagcacgatatgtttcctgagagttttacgttttccatcgccgactgggtcaacggttgggtggactcactggtcaccaactacggtgatgtgttccggcacatttccgacaccctgctgtgggccatcgtcaacctggaagggttgctgcgcgcagcgccgtggtggctgatgctggccattgtcggcgccgtcgcctggcacgcgacccgcaaggtggtgaccacggcagtgatcgtcggcctgctgttcctggtgggcgcggttggcctgtgggacaagctgatgcagaccctggccttgatgatggtcgccacggtgatctcggtgctgatcggcattccgctgggcatcttgtcggcgcgcagcaatcgcctgcgttcggtgctgatgccgctgctcgacatcatgcagaccatgccgagttttgtgtacctgatcccggtgctgatgctgttcggcctgggcaaggtcccggcgattttcgccacggtgatctacgccgcgccaccgctgattcgcctcacagacctgggcattcgccaggtcgacggcgaagtcatggaagccatcaacgccttcggggccaaccgttggcagcaactgttcggcgtgcaactgccactggcgttgccgagcatcatggccggtatcaaccagaccaccatgatggcgctgtcgatggtggtgatcgcctcgatgatcggcgcccgaggcttgggtgaagatgtgctcgtcggcatccagaccctcaacgtcggccgtggcctcgaagccgggctggcgatcgtgattctcgcagtggtcatcgaccgcattacccaggcctatggtcgtccacggcatgaggcgagcaaatgactactgtcagcaaaatcgaagtcaaaaacgtcttcaagatcttcggcgcccgctccaaggatgcgctgtcgttgatcggccagggcaagaccaaggaccaggtgctggccgaaaccggctgcgtggtcggtgtgaacgacctgtccctgagcatcggcactggcgagatcttcgtgatcatgggcctatcgggttccggcaagtccactctggtgcgccacttcaaccgcctgatcgaccccaccagcggcgcgatcctggtggacggtgaagacatcctgcaactggacatggaagccctgcgccaattccgtcggcacaagatcagcatggtgttccagagcttcggcctgttgccccacaagagcgtgctcgacaacgtcgcctacggcctgaaagtgcgtggcgaaaccaaacaggtgtgcgccgaacgcgccctgcactggatcgaaaccgtgggcctcaagggctacgaaaacaaatacccgcaccagctttccggcggcatgcgccagcgtgtcggcctggcccgtgcgttagcggccgacaccgacatcatcctgatggacgaagccttcagcgccctcgacccactgatccgcgccgagatgcaggaccagttgctggagctgcaaaagaccctgcacaaaaccatcgtgttcatcacccacgacctcgacgaggccgtgcgcatcggcaaccgcattgcaatcctcaaggacggcaagttgatccaggtcggcacgccgcgggagatcctgcattcgccggcggatgagtatgtggatcggtttgtccagcggcgggcggcggtggtctgagctggaattgttggtgaggctgatggcctcatcgggggcaagccccctcccacaggggaatgcattccaaatgtgggagggggcttgcccccgataggtccggcagagctgcacaaaaattcaagaaggtatgaagatgccccaggcaacaaaaatcaccatcgccaacgccccgctgcgctggcaggacgtcgtcgccgtcgcccgccacggcgcggtgctcgaactctcgggccaggcctgggcgcgcatcgacaatgcccaggccatcgtgcagcgcatcgtcaccagcggtgagcgcgcctatggcgtgaacaccggcctgggcgcgctgtgcaatgtgtcgctcaagggcgagcaactcagccaactctcgcgcaacaccttgctcagccacgcctgtggcgtcggcccggtgttgagcgacgaacagacccgcgcgatcatctgcgccgccatcatcaactacagccacggcaaatccggcctgcatccgcaggtggtgcattcgctgctggcgctgctcaaccacggcatcacgccgcaagtgccgtcccagggctcggtgggttacctgacccatatggcccatgttggcgtggcgctgctgggtgtgggcaatgtgagttaccaaggtcggatcgttccggctcaagaggcattgaacgcggaaggtctgcagccggtggtgctcggcgccaaggacggtctgtgcctggtcaacggcacgccgtgcatgactggcctgagctgtctggccctggccgacgcgcatcacttgctgcaatgggccgacgtgatcggcgccatgagcttcgaagcccagcgtggtcagatcgatgccttcgatgaagaaatcatcgccctcaagccgcaccccggcatgcagcaagtgggtatcaacctgcgcgccctgcttgatggcagcgaagtgatcgccagcagcaagggcattcgcacacaggatgcgttaagcattcgctcgatcccgcagatccatggcgcggcacgcgaccaggtagagcacgccacgcgccagatcgagactgaactcaacagcgccaccgacaacccgctggtgctcggcacaccggaacactaccgcgtggtgtcccaggccaacccgcatggccagtccgtggccttggcggcggacatgctggcgattgccatggccgaaatcggcgcggtggccgaacgtcgcctggaccgcctgatcaacccgcacgtcagcggcttgccggcgttcctggtcagcaaccctggggtcaactccgggatgatgatcgtgcagtacgtcgccgcctcgctgtgcgggcaaaaccgccaattggcgcaaccggcggtgctcgacaacttcgtcacctcgggcctgcaggaagaccacctgagcatgggcaccaatgcggcgctcaagctgcaccaggtgctggccaacgtgacccagattctcgccatcgagtacttgttggcggcccaggcgttcgagtttctcaaggaacaacgtttcggcgtcggcaccgaacgtgcctggcgtctgctgcgcgacgtcgtgccggcctatgaacaggaccgttggctggcgccggacattgccgccgccgctcaactgctgaaaaacaccgatttaccgaatgtgcacttttaaaagaacaattcagaaggagtatgaatgtgactgcgctaaacctgattccaggccaactgagccttgcccaactgcgagccatctaccagcagccggtaaccctcagtctggatgacagcgccacggcgcagatcgaagccagtgtggcctgcgtggagcagattctcgccgagaaccgcaccgcctacggtatcaacaccggtttcggcctgctggcctcgacccgcatcgccagcgaagacctggaaaaccttcagcgttcgctggtgctgtcccacgccgctggcgtcggtgagccgatcagcgatgcgctggtgcggttggtcatggtgctcaaggtcaacagcctgagccgtgggttctccggcattcgtcgacaggtgatcgacgcactgatcgcgctgatcaacgccgaggtgtacccgcatattccgctgaaaggttcggtgggtgcctccggcgacctggcgccgttggcgcacatgtccctggtgctgctgggcgaaggcaaggcacgctacaaaggcgagtggctggaagcgactgacgcgctgaaagtcgccggcctcacgccgctgacccttgccgccaaagaaggcctggcgctgctcaacggcacccaggtgtcgacggcctatgccctgcgtggcctgtttgaaggcgaagacctgttcgccggcgccctggcctgcggcggcctcaccgtggaggcggtgctgggttcgcgttcgccattcgatgcgcgcatccatgcggcacgcggccagcgcgggcagatcgattcggcggcagcctaccgtgacctgctcggcgacagcagccaggtgtcccagtcgcaccagaactgcgacaaggtgcaagacccgtactcgctgcgctgccagccacaagtcatgggcgcctgcctgacccagttccgccaggcagccgaagtgctggtggtcgaggccaacgccgtgtcggacaacccgctggtatttgccgctgaaggcgatgtgatctccggcggcaacttccacgccgaaccggtggccatggcggccgacaacatggcgctggccatcgccgagatcggctcgctgagtgagcgccgcatctcgttgatgatggacaagcacatgtcgcaactgccgccgttcctggtgggcaatggcggtgtgaactccggcttcatgatcgcccaggtgaccgctgccgcgctcgccagcgagaacaaggcgttgtctcatccccatagcgtcgacagcctgccgacctccgccaaccaggaagaccacgtgtcgatggccccggctgcgggcaaacgcctgtgggaaatggctgagaacacccgtggcattctcgcggttgagtggctggccgcgtgccagggcctggacctgcgcgaaggcctgaaaacttcgccgaagctggaaaaggcgcgtggcatcctgcgcagcaaagtggcgttctacgacaaggaccgctttttcgcgccggacatcaacgccgccagcgaactgctcgccactcgctgcctgaatgagctggtgccggccaagctgctgccgagcctgtaaccgccacaccctgtagtgagcgggcttgccccgcgctgggctgcgnnnnnnnnnnnnnnnnnnnnnnnnnnnnnnnnnnnnnnnnnnnnnnnnnnnnnnnnnnnnnnnnnnncgcagcccagcgcggggcaagcccgctcactacagttgtcaggcaactggctctaaattttctcaggataaaaataattaaggacgagaaatgcaccagcaagaaaaaggtttgaaacgcgggctcagcgcccgacatattcgcttcatggcactcggttccgcgatcggtaccgggttgttctatggctctgcctcggccatccagatggccggccccgctgtgctgctggcctacctgatcggcggcgccgccgtgttcatggtgatgcgcgccctcggcgaaatggccgtgcacaacccggtggccggctccttcggccagtacgccagcacctacctgggccccatggccgggtttatcctcggttggacctacgcgtttgaaatgatcatcgtgtgcctggccgacgtcaccgccttcggcatctacatgggcttctggtttcccgaggttgcgcgttgggtctgggtgctcggcattgtgtttttgatcggcggcctgaacctgtgcaacgtcaaagtgtttggtgaaatggagttctggctgtcgctgctcaaggtcggcgccatcgtggcgatgatcctcggcggcttcggcatcatgctgttcggcatccactcggccggtgagacccaggccagtggcctcagcaacctgtgggcccacggcggcttcatgcccaatggcatcggcggcctgatcgcttcgtttgcagtggtgatgtttgccttcggcggcatcgaaatcatcggcatcaccgccggcgaagccaaggacccgcagcgcgtgatccccaaggcgatcaacgcggtgccactgcgcatcctgttgttctacgtgctgaccctgttcgtgctgatggccatctatccgtggccgcagatcggcagccagggcagcccgttcgtgcagatcttcagcaacctgggcattggctcggcggcgaccatcctcaatatcgtggtgatctcggccgctgtttcggccatcaacagcgacatcttcggcgccggccgcatgatgtacggcctggcccagcaggggcaggcacccaagggcttcgcgcaactgtcgaaacacggtgtgccgtggatgactgtggtggtgatgggcgcagccttgctgggtggggtggtgctcaactacctgatcccggaaaacgtattcctgctgatcgcctcgattgccaccttcgccaccgtgtgggtgtggctgatgatcctgttcacccaggtcgccatgcgccgctcgatgaccaagcagcaagtcgctgagctgaagttcccggtgccgttctggccctatgcgccggcggccgccatcgtattcatgctgttcgtgtttggtgtgctgggttacttcccggacacccaggctgccttgctggtcggtgccgtatggatcgtgctgttggtggtggcctacctgctgtgggtcaaacccgctgccgggcaagcggccaaggtccattacgacccggctttgtctcatcgttaatctagggaggcgttgatgaaaacgctttggcaacactgccacgtcgcaaccatggcccagggcaagtactcgatcatcgaggatgccgccatggtcaccgcgggttcgctcatcgagtggatcggcccccgcagccaggcacccacggcggattacgcccaggtgcatgacctgcacggcgcgtgggtcacccccgggctgatcgactgccacacccacacggtgttcggcggtaaccgcagcggcgaattcgagcaacgcctcgaaggcgtcagctacgccgagatcgcggccaagggcggtggtattgccagcacggtgcgcgccactcgcgccgcaaccgaagatgagctgtttgccagtgctgaaaaacgcctgcgcagtctgctgcgtgatggcgtcaccaccgtggagatcaagtccggctacggcctggacctagccaacgaacgcaagatgctgcgtgtggcccgtcgcctcggtgaagcgctgccggtcagcgtgcgcgccacgtgcctggcggcccatgcgttgccgccggagtacaaggaccgcgccgacgactacatcgaccatatctgcgccgacatgctgccggccctggcggcggaagggctggtggacgcggtggatgcgttctgtgagtacctggcgttctccaccgaacaggtggagcgcgtgttcaaagttgcccagcaactcggcctgccggtgaaactgcacgccgagcagctctcttcgttgcacggttccagcctggccgcgcgttaccaggcattgtcggcggatcacctggaattcatgaccgaagaagatgccatcgccatggccgcttccggcaccgtcgcggtgttgctgccgggcgccttctacttcctgcgcgaaacccaattgccgccgatggaggccctgcgcaagcacggcgtgaaaattgccatcgccagcgacctcaaccccggtacttcgccggcgttgtcggtacgcctgatgctgaacatggcctgcaccctgttccgcatgaccccggaagaagccctggccggtgccacgcaacatgcggctaccgcattaggcatgggcgacacccacggttcgctggaggtgggcaaggtcgcggattttgtcgcttggcagattgatcgtcccgccgacctggcgtactggctgggtggcgagctggataaacgcgtcgtgcgccatggcgtcgacgccactgtatgaggagtactgcttgtggataaggttctgaacttcaaacaaggccgcgtgccgctgctgatcagcatgccccatgccggcctgcgcgtgacgcctgcggtcgaagccgggttgatccccgaggcgcaaagcctgccggataccgattggcacattcctgcgctgtatgacttcgccgaagagctgggcgccagcaccctggccgccgaatactcgcggtttatcatcgacctgaaccggccgtccgacgacaagccgttgtacgccggtgcgaccaccgggctgtacccggcgacgctgttcgacggcgtgccgttgttccgcgaagggctggagccgtcccaggaggaacgcgtcagctatctgcagaaaatctgggggccgtaccaccgtgccctgcaagaagagctagcacgcctcaaggccgaattcggctacgccttgctgttcgatgcacactcgatccgctcggtgatcccgcacctgttcgacggcaagctgccggacttcaaccttggcactttcaatggcgccgcgtgtgatcccgaattggccagccaattggaagccatttgcgccgcgcatccgcagtactcccatgtattgaacggacgcttcaagggcggccacatcactcggcattacggcgacccggcgcaggatatccacgcggtgcagttggagttgtgccagagcacttatatggaagaggttgagccgttccgatatcgccctgatttggccgagccgacgcgggtggtgctgaagcaattgctggaagggctattggcctgggggcaagcgcgttatcggtgaattgcggggctgctggaatagctatcgggggcaagccccctcccaccttttgatttatgaacccagtcaaatgtgggagggggcttgcccccgatggcggtctcaccgtcgccccagtgcaactgccggtcgccacagttcgtgttgaatgcattttcactgcgtaaggttgttgaataaaaacagccgagtgagcgctcatccatgaaaaaactgttgttgcccctcacctgtgtcgcactgctcagtgcacacgccatggccgccgaaccggcctcctgcaaaagcatccgcatgggcgtggtcagctggaccgatgtgatcgccacctccggcatggccgacgtgctgctcaatggcctgggctacgacagcaaacagaccagcgcggtgcagcagatcatcttcgccggcatccgcgacaagcgcctggacatcttcctcggctactggaaacccgcgatggacaacaacatcgcgccgttcctggcggccaggcaggtcaaggtcttcgacaccccgagcctcgccgacgcgcaggccaccctggccgtgccgcaatatgtggccgacgcgggcttgaagacctttgccgacatcgcccgcttcaaggacaagctcggcggcaagatctatggcatcgagccgggcagcggcgcgaacaccgatatccagaaaatgatcgacaccaaccgcttcggcctgggtggcttcaagctggtggcctcgggtgaggcgggcatgctcgccgccgtgcagcgcgcggtgaatcgcaaggagttcgtggtgttcgtcggttggaccccgcacccgatgaacatcaacatgaaaatggcctacctcaccggcagcgaagacgtgttcggccccgacgaaggccgtgccaccgtgtccaccgtcaccgcgccagacttcgccgagcgctgccccaacgccaaccgcctgttggaaaacctcaccttcaccgccgcccaggaaagccagttgatggtaccgatcatggagcgccagtcgccgcaggaggtggccaggcaatggttgcgtgatcatcccgaggatttgcagcgctggttggctggggtaaaggcatttgatggcggcgatggtgtagcggcggtgcaggcgagccttaaatgagtcgatacccgatctcgccggaactggcggcgtttgtggagaagacggagtccttcacgagcgacgacgcgtcgctggctgggttgcgccacagctacgaccgcatgtgccaggcgtttaccccgccggtgcccgacgggctggcgatgacggatttttccctggctggcgtgagtgtgcgcagttatctgcccgctgcccccgcgcccttggctggctggccgtgccttctttatatgcacggcggtggttgggtggtcggcgggctggattcccacgacttcatctgcttcgaattggccacggccttgcaggtgctggtaatcgccattgattaccgcttggcgcccgagcatccgtttccggcggcctatgaggattgccgcgccgtgtggcaggcgatccaggcggggcaggggccgcatgccatcaacctgcaacgcctggtggtgatcggcgacagcgcgggcggcaacctggccgcggcggtgtgcctggggttgcgcgacgaccggcagccactgccgctggcccaggtgctgatttacccggggctgggcggcccacctgaactgccgtcgcggcgcgactgtgcggatgcgcccttgctcagcagcgccgacactgagagttacctggcgctgtacctgcagggcagcggcaagcccacggcgtatgccatgccgctgctggtcgacgacttcagcggtttgcccaaggcattcattgccgtggcccagttcgacccgctgcgtgatgacggcatgctttacgccgagcgcctgcaagcggcgggtgtgagcagcgtgctgtatcccggcaaaggcctggtgcacggttgcctgagggcccggcggcacgtaccggaggtggaccggctctacgatttcctgctggattacctggggagcgaagggctgacacaggtctaagcgctctaggacatgctcattgcacaattcgggtttatagtgccagacggcaaaataaaagacgtccccccagggatgaacccgaccccttacggagcgcgcaatgcagacttggtacccgcagatcaaaccctacgcccggcacgatctggcagtcgatgacatccacacgctgtacgtcgatgaaagtggctcccccgaaggcttgcccgtcgtattcatccatggtggccctggttccggttgtgatgcgcagagccgctgctacttcgatcccaacctgtaccgcatcgtcacctttgaccagcgcggctgcgggcgctccaccccgcgcgccagcctggaaaacaacaccacctgggacctggtcgccgaccttgagcgcatccgcgagcacctgggcatcgaaaaatgggtattgttcggcggttcctggggctcgaccctgtccctggcctacgcgcaaacccacccggagcacgtgcatggcctgatcgtgcgcggcatcttcctggcccgcccgcaggacattcattggttctaccaggagggcgcgagccgcctgttcccggattactggcaggactacatcgcgccgatcccggtggaagagcgccacgacatgatcgcggcctaccacaagcgcctcaccggcaacgaccagatcgcccagatgcacgcggccaaggcctggtccggttgggaagggcgcatgttgggcctgtgcccgagcccggcgcacgtggagcgtttttccgagccgcaacgcgccctgtccatcgcgcggatcgagtgccactacttcaccaacaactcgttcctggagccgaaccagctgatccgcgatatgcacaagatcgcccatctgcctggcgtaatcatccatgggcgctacgatatgatctgccctttggataacgcctgggagttgcaccaggcgtggcccaacagtgagctgcaggtgattcgcgaagccggccatgcggcgtccgaacccggcatcaccgatgccttggtacgtgcgaccagcgaaatggcacggcgcttgctcgatctgccgcctgaagaagcatgaagggcctgttgcaacgggtgcgcggcgcccgggtcgaggtcgcgggcgaaatcgtcggcgccatcgaccagggtttgctggtgctggtggccgtcgagcctgcggatacgccggaaagtgccgataagctgctgcacaagctgctgaactaccgggtgttcagcgatgccgaaggcaagatgaacctgtcgttgaaggatatcgacggcggtttgttgctggtgtcgcagttcaccctggcggcggataccaagagcgggctgcggccgagcttctccacagcggcgccgccggccctgggagcggcgctttttgatcacttgctgttacaagcgcaacaattgcatggcaaggtggcgtcggggcgttttggcgcggatatgcaggtgcatttggtcaatgatggccctgtgaccttcctcttgcagacgtgaatgtattaaaaacgacttttaatgcctaaaaacgcagggtttcgctacaaatacttcgttgtccctgatgcgttgtctcgcgggctactagataatcgcgcgctacggggatcagcgttgtttggtccatttttgacttaggtagagacttgtccgatcgccaatggggaatcattttgccccaggggagtcggaacaatgctcgccaacctggcatatagatagctggccgttggttttttgatctgttttcggcgagggttgctcgtgattgttagtccctgtaatgcaccaaaattgtctgccaaacggttacgaaacgcactggtgacgggctccgccctgttttgcctgttcggcgcgggtcaactgtgggcattcagtctggatgatgtgtcggccaaggcaaaagagctggccgggcagaaatacgaagctccgcgcagcaatctgccgaacgaattccgcgaaatgaaattcgcggactaccagaagattcgtttccgcaacgaaaaagccgagtgggccgatcagaacaccccgttcaagctgtccttctatcaccagggtatgcacttcgatacaccggtgaaaatcaacgaagtcaccgccgacagcgtccaggaaatcaagtacgacccgacacgcttcgatttcggcgacgtgaagtttgatcccaaagccaccgaacagctgggttatgccggcttccgtgtgctgtacccgatcaacaaggccgacaagcaagacgaaatcatgaccatgctgggcgcgagctacttccgcgtggtcggcaagggccaggcctatggcttgtccgcccgtggcatggcaatcgacacagcactgccgtccggcgaagaattcccgcgtttcaccgagttctggatcgagcgtccaaagccgggtgagaaacaactggtgatctttgccctgctggactcgccgcgcgctaccggtgcttaccggctgatcctgcgtccgggcaccgacaccattgtcgacgtgaaatcccagatgttcctgcgcgacaaggtcagcaaactgggtgttgccccgttgaccagcatgtacctgttcggcgccaaccagccgtccaaagtgctcaactaccgccgtgagctgcacgattccagcggcctgtcgatccatgccggcaacggcgagtggatctggcgcccgctgaacaacccgaaacatctgtcggtcagcaacttcaccgtcgagaacccgcgtggtttcggcctgctgcaacgcggccgcgacttcagccactacgaagacctggacgacaactacgacaagcgcccaagcgcctggatcgagcctgaaggcgactggggcaagggcaccgtcaacctggtagagattccgaccgccgatgaaaccaacgacaacatcgttgcgttctggagcccggaaaaactgccggatgtgggccagccgctggacgtttcctaccgcctgcactggaccatggacgaaaaatccctgcacccggccgacagcgcctgggtcaagcagaccctgcgttccaccggtgacgtgaagcaatccaacctgatccgccagcctgacggcagcgtggcctacctggtggacttcgagggcccgtccctcaaggccctgccatcggatgccgcggtacgcagccaggtgagtgtcagcgacaacgccgaactggttgaaaacagcgtgcgctacaacgagcacaccaaaggctggcgcctgaccctgcgcatgaagatcaaggacgcaggcaagccaaccgaaatgcgtgcggcgctggtgcaggacgttccgcctccggcccctgagcaggacacgagccatgtgctcaaggccgacaaggtcctggccaagcaacacgagaaacaggccaagaaagacgcaaaagacaaggaagccaagcagccagaagctgccccagccacgccggagccgatcaagaccgaacaagtcctgaccgaaacctggagctatcagttgcctgccgatgagtaattctcaaatccagccggagactctgtcagagtacctggcgcatctgccgatgaccgctgagcagcgcgccgaactggcgggttgctcatccttcagcgagttgcacgagcgtttgtcgtcgaagaccttcgacgcgcccattgacgccgcccaggcgtcggttggcacgcggttgaccctcagcaccgccgaagagctgcaggacgccgaaatgctggccctcgacgccgagggccgcgtgtgcctcaaggctacgccgccgatccgtcgcactcgtgtggtcccggagccgtggcgcaccaatatcctggtgcgcggctggcgccggatcaccgggcgcagcaacccgccggccccgccgaaagatgagcgcgtattgccggctgcccgctggcgtaccgtcggttcgatccgccgctacatcctgctggtgctgatgatcggccagaccctcgtggccggctggtacatgaaaggcatcatgccgtaccagggctggtcgctggtcgacttcgacgagatccgcaaccagaccctgctgcaaaccgcgacccaggtactgccctacgccctgcaaaccagcatcctgatcatgttcgggatcttgttctgctgggtatcggccggtttctggaccgcgttgatgggcttcctggagttgctcaccggtcacgataaataccgcatctccggtaaaagcgccggcgacgagccgatcccgaaagacgcccgcaccgcgctggtgatgccgatctgcaacgaagacgtgccccgggtgtttgccggtttgcgtgcgacgttcgagtcggtcgccgctaccggtgacctggatcgcttcgacttcttcgtgctcagcgacagtaacgaggccgacatctgcatcgccgaacagcaagcctggcttgacgtgtgccgcgaagccggtggtttcggcaagatcttctatcgccgtcgtcgccgtcgcgtgaagcgtaagagcggcaacctcgacgacttctgccgtcgctggggcggtgactataaatacatggtcgtactcgacgccgacagcgtgatgagcggcgaatgcctgaccagcctggtgcgcctgatggaagccacgccggatgcggggattatccagaccgcgccgcgtgcgtcgggcatggacaccctgtatgcgcgcatgcagcagttcgctactcgtgtgtacggcccgctgttcaccgccggcctgcatttctggcagctgggtgaatcccactactggggtcacaacgcgatcatccgcatgaaaccgttcatcgagcattgcgccctggcgccgttgccgggcaagggcgcgttcgccggttccatcctgtcccacgacttcgttgaagccgcgctgatgcgccgtgccggctggggcgtgtggatcgcctacgacctgccgggcagctatgaagagctgccgccgaacctgctggatgaactcaagcgtgaccgtcgctggtgccacggtaacctgatgaacttccgcctgttcctggtcaaaggcatgcacccggtgcaccgtgcggtgttcctgacgggtgtgatgtcctacctgtcggcaccgttgtggttcctgttcctggtgctgtccacggccctgctggcggtgaacaccctgatggaaccgcagtacttcatggcaccccgccagttgtacccgctgtggccgcaatggcatccggacaaggcggtggcgctgttctccaccaccatcgtgctgctgttcctgccgaaactgctgagcatcatcctgatctgggccaagggcgccaaagagttcggtggcaagttcaaggtgaccttgtcgatgctgctggagatgctgttctccatgctgctggcgccggtgcggatgatcttccacacccgcttcgtcctcgccgcgttcctcggctgggccgcgacctggaactcaccgcagcgtgacgacgactccaccccgtggagcgaggccgtcaagcgccacggtccgcaaaccgtgctgggcttcctgtgggcgctgttggtggtgtggttgaacccgagcttcctgtggtggctggtgccgatcgtcggttcgttgatgctgtcgatcccggtgtcggtgatttccagccgtgtcgggctgggtctcaaatcccgcgacgagagcctgttcctgatccctgaggaatacaatccgccgcaagcgctgctgtctaccgacaagtacacccacgaaaaccgttggcacgcgctgaatgacggctttgtgcgttcggtggtcgacccgcagcagaacgctttggcttgcgccctggcaacctcgcgtcacgcccaggccgaaccgatcgagtacctgcgtaccgaacgtgtgcgccacgcgctgaaagtcggccctgccggcctcagcaacggcgaacgcctggccctgctcagtgacccggtcgccctggcgcgcctgcacgagcaggtctggagcgaaggtcatgccgagtggctcgccgcctggcgggactcgatcaaggcagatccgcatgcaccgttgctgccgctgcaaccgctgtcgtcccaggcccaaccggcctgattcaggcacccccgagggctcgcctcgggggtgttcgcagcgctggtcctacagcgtttcccgcgttttctctgttgtgccaacaccttgttatttcgaaacaaaagaccctcgcttgaggcgtattgccgtgcccgtggctgcgttagcatcgcccccgcatttgacttggcacggggggattcatgatcaaacggtatgttttggcgctgctcataggcgctgtcgctttcattcacatgggcctggcccaggccggcgcgattgatgacgccgttcggcgcggcgtgctgaaagtcggcaccacacccacttacgtgcccttcgaaatgaccgataaacaggggcgcatcgtcgggtttgaaatcgacctgctcaaggtcatgagccaagccctcggggtcgaacttgagttggtcgtggtgccctacaccgaactggtggcggggctcttggcgaagaagttcgacctgatcggcagcggcatgaccgtcacccaggaacgcaacctcaagctgaatttcagcgattcgttcatcgtcgttggccagtcggtgttgttgcacccaagccttgcgggcaaggtcaccagtgtcgaagacctcgatgatcccggctaccgaattgccgccaccgaaggcaccaccggcgagtcagcggctcgacgttttctgggggcagcgcgactcagcagttttgccacgccggaggaaggcgtacgccaggtggtgcagggcaaggctgacgcctttattcatgatgccccctacaacctgatcgccctgaaccgcccggaaaacagcaccctgttggcactggaacaacccttcaccttcgaacccctggcgttcggcttgaaaaaaggtgatttcgacagcctcaactggatcaaccatttcctcaatcaggtggcgcaggacgggacctatgatcgcttgcacgacaagtggtttaaagacaccgactggctggtggaaatcgactgaaagtcataactgcttacacatcaagccgttgcccgagctgcctgagcaagtgtctacccctgcggtttgctgcagcgttgtggggcttttccgacatacgccgacaacaaatagccgtgaaacctttgtgacggcaggcgagtgggttaggatcgcaccccgaaatggtgcagcccttttgcgcgccgaccttataagaatggttcaggggacttgatgatgaaaaagtatctttcgatgctgctgctcggcgtcaccgcgctggtcgcggccaatgcggcccaggccggtgcgatcgacgatgcagtcaagcgcggcacgctgaaggtcggcatggacccgacctacatgccgttcgaaatgacagacaaacgcggtgaaatcatcggtttcgaagtcgacatcctcaaggccatggccaagtccatgggcgtcaagctggagctggtctccaccggctacgacggcatcatcccggccttcctgaccggcaagttcgacatgatcggcagcggcatgaccctgacccaggaacgcaacctgcgcctgaacttcagcgaaccgttcatcgtggtcggccagaccctgctgattcgcaaggagctggaaggcaccatcaagtcctacaaagacctgaacgacgagaaataccgcctgacttccaagctgggcaccacgggtgaaatggtcgccaagaagctgatctccaaggccaagtaccacggctacgacaacgagcaggaaggcgtgctggacgtggtcaacggcaaggccgatgccttcgtgtatgacgcgccgtacaacgtggttgccgagaagaaagtcggcaacggcaagctggtgttcctggaagaacccttcaccttcgaacccctggcgtttggtttgaagaagggcgactacgacagcatcaacttcatcaacaacttcctgcaccagatccgcaacgacggcacctacgatcgcatccatgacaagtggttcaagagctccgagtggctcaaggacatggaataacgcttcagaccgagttgcctgtatcgcaggcaagccagctcccacatttgacggtgttcacacatcaacatgtgggagggggcttgcccgcgatggcggcctcacaggcaacacaaatcgcggaaagtgaaatgaaacagaaaaaagcccaatggccctggcacctgctgaccgtggtcgtgctggtcggcctggccggcgcgttgtactacgccacctcgttgatgtcctacgagtggcgctggaaccgcgtgccgcagtacttcgcttaccaggcggaaacatcccagcgtgccgctgacatctccaccgtggtcgagctggtacgcaaaggcgatgtggccgaagtcaccctgcgcaacgatgcaggcgccgagcaaaagctgaccgtggccgacaacagcctgcaagtggcgcgtggcgacgatgtggccgaaggcgacgtggtgggcgtgacccggcagtgggcgctgggcccgttgatgtggggcttgtggaccacgttgtggttgtcggtggtgtccggcatcctcggtttggcgatcgggctcgcgacgggtttgtgtcgcttgtccagcaacccgaccctgcgggatctgtcgacgatctacgtcgaactggtgcgtggtacaccactgttggtgcagatcttcattttctatttctttatcggcacggtgcttaacctgtcgcgggaatttgccgggatcgccgcgctttcgctgtttaccggtgcctacgtggcggaaatcgtccgcgccggtgtgcagtccatcacccgtggccagaacgaagctgcccgttccctgggcctgagtgccagccagtcgatgcgccacgtggtgttgccgcaggcgttcaagcgtgtgctgccgccgttggccgggcaatttatcagcctggtgaaggacacgtccctggtgtcggtgatcgcgattaccgagctgctcaagagcggtcgtgaagtcatcaccacctcgttctcaccgtttgaaatcctgttctgtgtcgcaggcctgtacctgctgatcaacctgccgctgtcgaaaatggccagccggcttgagcggaggctcgcgcaaagtgattgaagtccgcgatctggtaaaagtcttcgacacccgtggtcatgtggtccgtgcggtggaccacgtcaccacgcaggtggccaagggcgaagtgctggtggtcatcggcccgtccggctccggcaagtccaccttcctgcgttgccttaacggcctggaggaattcgactccggctcggtgagcatcgacggcctgcaactggctgacccgaagaccgatgtgaacgcctaccgccgcgaagtcggcatggtgttccagcacttcaacctgttcccccacatgactgtgctggagaacctgtgcctggcgcagaaagtcgtgcgcaagcgcggcaagcaggagcgtgaggccaaagccctggcgctgctggaaaaggttggcatcgcccagaaagccaacgagtttccgtcgcgcctgtctggcgggcagcagcaacgggttgcgattgcccgggccctggcgatggagcccaaggtgatgctgttcgatgaacccacctccgcgctggacccggaaatggtcggcgaagtgctggatgtgatgaagaccttggccctggaaggcatgaccatggtctgcgtcacccacgaaatgggctttgcccgtgaggtggccgatcgcgtgctgttcttcgaccatggcaagttgctcgaagatgccgccccggccgagttctttgatgcaccgaaagacccacgggcccaggcgttcctgcgccaggtcctgtaaggctcagagcctgaatttgccgaccagcgtctgcaaatccaggctcagtttggtcagttggacgctcgccgccgctgtttcctcgctggcggcggcggtctgttccgacacatcccgcaccttcaacacgctgcgattgatctcttcgaccactgcactttgctgttcggccgcggcggcaatctgcgggttcatttcctggatcaccgagaccgtgcgcgcaatcgccgccagggcgtcacctgcgtcgcgggtcagctcgacactgtcgtcggtcaggctgcggctgctgtccatgatgtcggcgacttgctgggtgccggtctgcaacccctggatcagtccttcgatttcttcggccgattcctgggtgcgctgtgcaaggctgcgtacttcatcggccaccaccgcaaagccttcgccggccgtgcccgcgcgtgcggcttcgatggcggcgttcagcgccagcaggttggtctgctgggacaccgatttgatcacatccagcacgctgccgatcttctggctttcttgctgtaacgccagcatcgcccggcccgcgagggccatctcatctgccagttggcttatctgctcaacggcctgggtcaccactttctccccggcgctggcttgcagatcggcttcgttcgccgcgaccgaggcttgctcggcgtgccgggcaacttcctgtgtggtggcgagcatttcgttcatggcggttgccacttgatcggtttcgtctttttggtggttgatgccggtgtgactgtgttcggtaacggccgacagctgtgtggcggcgctggcgacctggcgggcgctgtcgccgatgccgctgatcaggctgcgcaggttgcggttcatgtcactgatagttcgcagcaattgccccaactcatcgcggcgttccacttggatgtcatggctgagatcgccctgggagatgcggttggcagacaccagcacctggcgtagcggcacggcgatctggcgagcgatccaccaggctgcaagggcaccgagcagcagggcagccaccgtgacgctgatgagcagtgtccgggtgttgtcggcttccttgccgcgcttgagaatctggccattgctcaccgcttcgctttgttcaagcaactggttgagctgcgtttcaaaccgcccctgcgcagtttcggtggtgagctgagcgtccttgagcttgatcaactgcgcgcgatagttcgccaggtcggttttaagcaaggttgaatcgatcggcaggtctgtcacggccgcttgggcaatgtccagggcatcgagggcctggccgacggcttcggcataggcttgcagcgactcctccgcccaggcagggcttcgggcgcggtcctcggcttgctccatagcctggcgcaggttctcgatggcatcgagtgcctgctggtcctgctggtcaggcagttcgctggcgagttgtgcgagcgtgtcgctggcctggagtgctgtggcgtggaggggggagcgcaagttctcgcgcgcctggatcaacggcggcagctccaccagcgccgccttgaagctggccgacaggcgttccgcttcctggacgcgctgcaagtcggctgggtctttcagatgggttgacaggaagcggaggtgctcatcgatctgaacgacttgcctcttcattttgtccaggctggccgtgtccgccagggtccggtacacgatacggtccgcacgcatggcttcagcaacaaccgacagttggctcaaggcagtcagattgcctgagcggaacaacaccgcattcagggcttgccagccggccacggcgatggcgaagctgagcatgagcacctggccaaaccccagggcgagcttgaggcggacgctggcattgaccagccaacgggccagtagaggaagcatgatgaacctccaaatctgaaaaagcgtttcgcgacaaaagaaacgctaattcgattcggagtattgctgggctgataactgcgtaggaaatttcacaaggtgctgattagatgcggaagcgccccaccagtgtctgcaggtaaatgcccaggcgtgcgagctcggcactggaggcggcggtttcttcactggccgaagaggtttgttccgacacatcgcgcacgttcaatacgctgcggttgatctcctcagccaccgcactttgctgttctgcggcagtggcaatctgcgagttcatcgcctggatggtcgagaccgtgcgcgtgatgctcgccaacgcgctgccggcgcgacgggtcaactcgacgctgctgtcggtgaggccacggctgttgtccatgatggtcgcgacctgctgggtgccgctttgcaggccgacgatcagttcttcgatctcttcagtggacttctgcgtgcgctgggccaggctgcgcacctcatccgccaccacggcgaaacctcgtccggcttccccggcacgtgcggcctcaatcgcggcgttgagggccagcaggttggtttgttgcgctacggacttgatcacatcaagcacactgccgatcttgtcgctttcgcgcttcaggtcacccatggcgacggtggaattgcccacctcggtggccaggcgttcgatctgggcgatggcttcgcccaccaccttgtcaccctcgcgggcctgctgatcggcggccacggcggcctcagaggcttcctcggcgttacgcgccacttcctgcacggtagccgccatctcgttcatggcggtggcgacctggtcggtctcgaccttctggctgttgacgccggcgctggtttgttcggtcacggccgacagctgctcggcggcgctggcgatctgggtgacgccgtcgctgatcccgccgatcagctcacgcaagccgacggtcatgctttgcatggcgcgttgcaactggcccagttcatcctggcgcaaggaagtgaggttgtggctcaggtcgccggaggctacgcgttctgccacctgcagcgtctggttcagcggaatgatgatctggcgggtgatggcccaggcggccaccagaccgaagatcagcgccagcacggtcgccagcagcaacagttgtttggcccgcgcggcgtcggcgtcgcgtaccacggtttgcgaggtggtgagtttttcgctgtggttctgcagggtctcgccttgggcgctcatgattttcagcgcgtcggcggcggccgtctgggagtcacggtactggctgacggccgcgcggtaggcttgcagtgaagtgctggcctcctgcaggttggcctggtactccgcaggcaattggccctccagcgcggtgattttcttcacggcgttatcaatcgcgtcgagggccggctgctccgcctcgaccttggcactgtaggtgtagccgcgtacctggaagcgtgcctgctggatcagtttgctcaggtcgaccacgctgttgaactgcgtgacgctgtcaccttgcagcagggacttttccacctcattgaccttggccacggcgttgtcggcggtgtcgcccagcttgctgcgcgcgccttcacgcttgagcccggcctggaccatggcgccgaaggcttttttgtattggttcaaggcgtcctgttgttgttccaccagggccttgtcgtcgggttgctcgatcaggtcggcggcggtcttgaggccgctgtccagtttggcgatcaggccgttgaccgcgtccgtgccttgttcgccgcgacgcatttcgaagtccaggcgcgccaggcgcaagtccttggtcagtccgttgaggctggagatatagcccagcttgtcaccgcgactggtgacatcccccaagccggtccaaccggtgaaggtgatcatcaacgtgagcagcaataccaggccgaagcccacgccgagtttggttttgacgctgacattccccagcttttcggctaaccaacgatacatgctgcgaactcccctggaacaaggcttggacttatccagaggatatcggccagcacgcgcaattctgtagcgaagctgtacccatgtgggagggggcttgcccccgattgcagtggttcagcaatggataagctggatgacacaccgctatcgggggcaagccccctcccaccgggttgcttagggaagttagaagagtcgggcgagcagggcggtgacggcggtttcgacgcgcaggatgcgggcgcccagttgcaccggctgcaagccggccttggccagcaggtccacttcgtagggaatccagccaccttccgggccgatggccagggtcaccggctcatccagcccgcgggggcaggctggatagtcgccaggatgaccgaccaggcccagggtgccttcagtcatcgccggcaggcggtcctcgacgaacggcttgaagcgcttctcgataatgatctcgggcagtaccgtatcccgcgcctgttccaggccgaggatcagttgctcgcgaatcgcctcgggttccaggaacggcgtttgccagaagctcttttccacccggtaactgttgaccagcaccaccttgggcacgcccatggccgccacggtctgcagcacccggcgcagcatcttcgggcgcggcagggccagcagcagggtcagcggcagtttggccggcggcggttggtcgaagctcacatgcaactcggcttcactggcctccaggcgcaacagttgggcattgcccatcaagccacccatgcggccgacgcgcaggctgtcgcctacggcggcgcggtggacttcctgcatgtgcaccaggcgccgatcacgcaacactacgcggtcggccgcgatgaaatcggcctcctccagcagcagcaggttcacggctgggtcgctggcggctggtcgtcgtcgcgctggtcatccgggtgttcgccgcgcttgctgatcaggttgctgaacaggatgccgatctcgaacagcatccacatcggcacggccagcagggtctgggagaagatgtccggcggcgtgaggatcatgccgaccacgaagcagccgatgatcacgtacgggcggatcttcttcaggtacgccacgttgaccacgccgatccataccagcagcaccacggccaccgggatttcgaaggccacgccaaaggcgaagaacagcgtcatcacgaagtcgaggtagctggtgatgtcggtcatcatttccacaccggccggggtggcggcggcgaagaacttgaagatcagcgggaacaccaggaagtaggcgaacgccatgccggtgtagaacagcaggatgctcgacaccagcaacggcaccgcgatgcgtttctcgtgcttgtacaggcccggcgcgatgaagccccagatctggtgcaggattaccgggatcgccaggaacagcgaaaccatcatggtcagcttcagcggcgtgaggaacggcgacgacacgtcggtggcgatcatcgtcgcgccggccggcaggtactggcgcagcggcgtggagacgaaggtgtagatctgctgggtaaaggcgaacagcccggcaaagatgatgaagatggccgctacgcagcgcagcaggcgggtacgcagctcggtgaggtgcgagaccagcggcatatgctggtcgttttccggtttatcagcgctcatggggctcgcggcggcaatgtagggtcatggggcgcgggcgacgcggcaggcgtcggcgcaggctcggttggggcggtcggtgcgacgggggcggcttcaacggtcggcgcgatgctgttttcagccgcaggctccaccggtttggctggctcctgcacgggcgccagaatcttgcgggcttcctgctccaacgagaggatgtgctcgttgtgcagttgccggcggatctcgtcggcgccgatttcccgttcaacttcctgtttgatcgcattgaaactgcgtttcaggcgcccgatccacaggccggccgtgcgcgcggcaccgggcaggcgttccggccccagtaccagcagggccacgaggccgacgagcagcagttcagagaagctgataccaaacattagtcagtgctcacgagtctttgcgggtcggctcttcgactttctcagcctgtacgtcgaaggtacgacgctcagtgattggctgggtagcctgcgggtgcacaggctgcgccggaggcacggggttgacggcagggtcggccggcttttcgtcgtcgttcatggctttacggaagcccttgatcgactcgcccacatcggtgcccaggttcttgagtttcttggtgccgaataccagtaccacgaccaccagaatgacgatccagtgtttccagtcaaaaatgcccatgctgcgtatcctctagtcttggttattcaggcggacgggcgcgaggccttctcggcgtgcccggacaagccgaagcgacggtccagttcatccagcacagcctgtgggtgctgccccagttgggcgagcatgaccaggctatggaaccacaggtcggcggtctcgtagatgacatcgctgtaatcgccgctgagctgcgcgtccttggcggcgatgatggtctcgatggactcttcgccgagtttttccagaatcttgttcaggcccttgtggtacaggctggcgacataggagctgtcggcgtccgcgcctttgcggtcttccagcacctgggccacgcggttcagggtatcgctcatgtctagtgtcctgccgagtagatggcgtgcgggtctttgagcaccggctccacgactttccattcgccgttctcgaacacgcgatagaagcagctgtgacggccggtgtggcaggctatgtcgccgatctgctcgaccatcaggatcaccacgtcggcgtcgcagtcgatgcgcatctcgtgcagggtctgcacgtgcccggactcttcgcccttgcgccacagtttgccacgcgagcgtgaccagtagatggcgcgctgctcagtggcggtgaggctcagggcctcgcggttcatccaggccatcatcagcacgcgcccggtcttgtagtcctgggcaatggccggcaccaggccgtcactgtcccacttgatctcgtccagccagtctttcatgttcggctccggcaatttgcgacagtgtataaccggattggctatcgacgcacgatcagataaacacccacggcgaccatgatgccggccggccagtggcccagttggttcagcgggccaccgatggccagcatcacgccgccgaccaggtgtgcggcgcccagcaggcgcaggaaccagtcatccttgcgcttgtgccacggcggcgccgggtccttggcatggggctgggacatgcgctccaacaggtcgcgggtcatgttggccaggtgcggcagttgttccatctggctgtgcaggttgcccagcacggttttcgggctcatccgctcgcgcatccagcgttcgaggaacggttgcgcggtgttccacaggtcgaggtccgggtacagctggcggcccaggccttcgatgttcagcagggttttttgcagcagtaccagctgcggctgcacttccatattgaagcgccgcgcggtctggaacaggcgcatcagcacctggccgaaggaaatatcttttaacggtttttcgaagatcggttcgcacaccgtacggatcgccgcttcgaattcgttgagcttggtttccgctggcacccaacctgagtcgatatgcagttgcgccacgcggcggtagtcgcgcttgaagaaggcgaacaggttgcgcgccaggtaatcctggtcttccggggtcaggctgccgacgatgccgcagtcgatcgcaatgtactgcgggctccacgggttgacggtgctgacgaagatgttgccggggtgcatgtcggcgtggaagaaactgtcgcggaacacctgggtgaagaagatctccacgccacgctcggcgagcatcttcatgtcggtgcgctggtcggccagggtggcgaggtcggtgacctgcacgccgtagatgcgctccatcaccagcactttggggcggcaccagtcccaatacacttgcggcacgtacagcagcggcgagccttcgaagttgcgcttgagctggctggcgttggccgcctcgcgcagcaggtcgagttcgtcgtagatggttttttcgtagtcggcgaccacatccaccgggtgcagcaggcgtgcatcggcgctgaagcgttcggcagcgcgggcgaggatgaacagccacgccaggtcttggccgatgatcggcttgaggcctgggcgtatcactttcaccaccacttcttcgccggtcttgagctgcgccgcgtgcacctgagcgaccgaggccgaggccagcgggtcgacgtcgaagcggctgaacacgtcgctgatcttcttgcccagttgctcttcgatgagcttcatcgattgctgagagtcgaacggcggcacgcggtcctgcaacagcatcagctcgtcggcgatgtcttcgggcagcaggtcgcggcgcgtcgagaggatctgcccgaacttgatgaagatcggccccaggtcctgcaaggccaggcgcaggcgcgcgcctctgctgagttccagctgtttgcgtgggaaccagcgccacggcagcacatagcgcacggcgagcaggaaccacggcaggggcagggcgaacagcaggtcatcgaggcggtagcggattacgacgcgctggatacgaaacaaacggcggacggcgagcagcttcatgcgttatcgcttggatcaagggaacggctcaggcgctcgaagcgcgcctcaaggcgttccaggtcgattttggccttgtcgagttcacgaaagcgcgcttgcgcttcccgctccccgaccagggtgcgcgattcttcgctcaggtattcggcgaggttctggttgaggctggcgaacccttgctggtaccagcgcgaacggctgcgcaggtgcccgctgatcaactgggtggcgacggggccgatccagcgcgacagttcgtattcccagtccagttccaggtcctgcagcacggcggcgaggtccatcagcaccgaactgtcgccttccaactccacttcggcgctgtgcaggatggcggtcttgttgcggctcagggccaggtgcaacaggctcgatgccggcgcacgcagggtgcagtcggattcggcggcccattgggtcgcgagcatcaggccttcttcgctgggcaggataaacagctgcaaggtggggctgcggcaatcgacggcaatcactttgccgttgaggtgcgcaagccgcgccagggcggtgctgtccaggcgcagtacacggttgaggccgtgttctgcgctggcgagaagacctttgatcagcatcagggcttgataccgcggtgcagggcgacgatgcccgacgtcatgttgtggtaggtcacgcggtcgaaaccggcctctaccatcatcgacttcagggtttcctggtcggggtgcatgcggatcgattcggccaggtagcgatagctctcggcgtcattggtgatcagcttgcccatcaacggcatgaaggcaaacgagtaggtgtcgtagaccttggacatcagcgcgttggtcggcttggagaactccagcaccaacaggcggccacccggcttgagcacgcgcagcatggagcggatcgcgtcttccttgtgggtgacgttacgcaggccaaaggcgatggtcacgcaatcgaaatggttgtccgggaacggcagcttctcggcatccgcctggacgaactcgatattgccggccacgcctttgtccagcaggcgatcacgaccgaccttgagcatcgaaccattgatgtcggccagcacgacctggccggttgggccaacgagcttggagaacttggctgccaaatcgcctgtgccgccggcgatgtccagcacgcggttgccggtgcgcacgcccgacaactcgatggtgaagcgcttccacaggcggtgcatgccgcctgacagcacgtcgttcatcaggtcgtacttggccgcgacggagtggaacacctcggcgactttttccgccttttggctttccgggacgttcttgaagccgaagtgagtggtgggttcggcatcgctgcctttgcgctgatcagtcatatcgctgtcaccaaaagagaatgcgggacatgataatccccaaggcctgctttgtcttggcaaggctgaaggtaagatgggcggtcagcgagaccttttgccgcatcgaaggtatccaagtccctataaagaggagtcattgcaatggcccgtataactgttgagcgtgcacattccctgggtaaagagggcgcgcgggcaaaggccgacaagttggcgcacaaactcaaggagcaatacggcctggagccgtcgtggtccggcgataccttgaacctcaagcgttcgggggttaaaggcacagtggtagtggccgaagattcgctgcgtattgatgtggagctgggtctgttgatgtcagccatgagtggcaccatcaagtctgaaatcgaaaaggcgttggacaaggcgttggcgtgatcccattgttcttagggtgccgattctaattttcccgcctactttgtgcccaagccctcaactcctgtgggccgttcctcccccctattctgcgtgaggtgcaccatggccaaagttatcctgaagaaaaaaatcgacgcccagaccaccaccctgagcgaggttaagtcctacgcccgcaagatttggttggccggtctgggtgcttacgccaaagtcggaagcgagggcggcgagtacttcaaagagctggttaaaaccggtcaacatgttgaaagcaaaggcaaaaaagttgcagttgaacaacttgaagccgccaacagtcagattgaccaagtaaagagtaatgtctccacggtcaaaggtctggtagaagttcagctggataaagttgaaaaagcttttgatactcgcgttgccagtgccttgaatcgaatcggcattgcgtctaaacatgacgttgagacactctctgctaagctcgaagagctgacgacattgctagaacgtgtcgcgcgtaaacactaaggagacatcgggatggctgttaaaaagactactcagaaagaaggcagctcgtgggtcggggaagttgaaaaatattcccgtaagatctggcttgctggtttaggcgtgtactcgaaggttagcactgacggcggtaaatacttcgagactttggtcaaggacggcgagaaagccgagaagttgaccaaaaccacggttggaaaaaaagttgaagcggccaaggcaactgccggctccgccaaatccagcattgctgacacttgggagaagttggaacagactttcgacaagcgtctcgccagtgctgtttcgcgactgggcgtgccgagcaaggctgaactgaaaacgctgcacagcaaggtcgataccctgaccaagcaaattgaaaaactcaccggcgctaaagtggctcccgtgaaagcggccgctgcaaaaccggctgccaagccggcggctaaaactgctgcggccaaacccgctgcgaaacctgcggccaagcctctggtaaaagccgccgccaagcctgcggctaaagctgctgccaagccagccgccaagaccgcagccgcaaaaccggccgctaaaccagtggccgccaaggctgctgccaagccggccgctaaacctgctgcaaaaccagcggccaaagccgcggcaaaaccggctgccaaaccagccgctaaaaccgcagccgccaagcctgctgccaagccggcagccgcgaaaccagccgccaagccagcagttgcaaaacctgcggcgaaacccgctgccaagcctgcggcaaaacccgccgccgccaagaagccagcggccgcgaagaaacccgccgccgccaagcctgcaacagcgccagtcgcttcgacagccaactcggtgtccgcgccaacgccagcacctgctaccccgactgcaacgccggcaacaccgacgccatccagtcagtcctgattttccggggcacacaaaaatgcccggcctgcgaaggtcgggcatttttttgcctgagtctcagagcgtcagttgtaggtgatcgacacggtcacgttggtgaccagcgtcccttgagtgacatccgcagcggtgtggctgacagcgtagtagcccgacagtggcagcacggctttccggttgctggttggcaccgtacgggtacgttgggcgggggttccgttggccgggatggtcaccgcggaaggcgtgcgatgcaccagccataagcccgtgcccttggatgtgcctgtgttggcaaacaacccggcgtttccacccgaaggggtgcctgtgaacaggaagtgcacgttgcggatatcggactcacagtcggcggtaacgtcaaactgccgttcgccggtgtaggtgatgttgtcaaagtctgaaatcttgatggtcggcaatacgatgctgcggctcacatcgccagccgccaggttgcacgtaccggcattgacctggccggtgaatctcagtgttccggtggtcgcggcctgcaccgcatgagtggccaggcttgcagtgattgccagcaggagaggcagggtttggatcttcatcaggtggtcctttgggggtcagttgtaggtgatgttgacggtggtggtgctggcgagcgtgccttggcgaaccgtgccgtttttgtagtaggccgcgcccagcggcaagaccgcacgattgcccgagacggcgaccgtgcgtgtggcgttgttgctgatggtctggttggccccactggtgcgcgagtacagccacagggcgataccgccagcagtgccggtattgctgaagagcgaggtgttcccgggggcgggagttccggtaaagcggaaggtgacgctggatgcattgctgcaagtggccgacagctcgaagttgctcgcacctgcgctgttagcgttgttgaacgcgctcacccgcacggtaggcagtgggatggtgcggttgacgtcgcctgtcgccaggtcgcaggtggcggccggcctgacgaaacgtacggcgctgcccagttgcaagcggaacgtgtttgaggatttaagccatttctgttcgaagaaggaacctgggggcactgtcccgctggtgacgggaccgatcttgtagaaggtcgcttctgccgaggtgaagcttgagaccggtccggtaatattgacccggggggtgttatgaagcgtaaaaattgcgttgagtccgctatttgttgtcatcctgacggccacgccaacgcctggaacttcggttgggtgcaggccctggttatgattattggggtagcgcccgttgatccactgggttgccagtacgcagaacgtgttccagccgggagccgcaccgttgaatgcctggcgaatgatcacaccgttgacgggcaggctgtcaggtacagggatagtcgccggcagattgagggttagtgtgtcgttctgatacttggggcaacttgcttgggcggcgattggcatcccgatccccagcattagcgaaacaagttttattgttggtttcattttcctcggtttccccatgacagagaggcccgctctactcggaggcggtggcggcctgcctgcgtgctcagttgtaagtgatgttgacggtggtggtagtggcgagcgtgccttggcgaaccgtgccgtttttgtgataggccgcgcccagcggcaagactgcacgattgccggagacggcgaccgtacgcgtaccgttgttactgatggtctggttcgcgccactggtgcgcgagtacagccacagggccacaccgccggcggtgccggtgttgctgaagagcgaggcgttcccgggggcaggagcgcccgtaaagcggaacgtgacgctggacgcgttgctgcacgtggccgtcagctcgaaattgctcgcgcctgcgctatcggcattgtcgaacgcgctcactcgcacggtcggcaaagggatagtgcggttgacgtcgcctgcagccaggtcgcaggtggaggccgggttcacaaagcggatggagttgttcagcaccatccggtaatggcccttgccgccatcccaattgttgtgctggatctcgccgctgggcagggtgccggtggtgaccgggcccaacttgtagaactccgccaccaaccttgtcgccccccagaggattcgcccaggcgccgatacgaggctttccgtcttgagtttcgcggagtagggcgcaccggaagtcagcgtgaccatgacgcgcatgccgataccgggaacgttggtgtgataaatcagcccgcccggcgccgattgggctgacgtaaatcgcccggtgagaaacgtcggtgtcgcggtggggcaccacatatagaacgtcggatacggccctgcgaacgtctggctggtgatcagttggcctacgccaaggttttccgggacggagatggtgttggggaaggtcacgctgtgttgcatgttggggtaccgatcacacgccgcgtgggcggcaatcggcatgcccagggccagcagtatcgaaatgaatgtgatggagtgtttcatcttcagtcccgtcatgagaaagggtgtttaagggcgaggagcgacgcgcccctcaccctcgatcaaccgcctgtaccggcccggcaggtgccagcgtccagttggcgcaggcgcttgccaccctcggccccaggctccttgtccaggcggtagttcagttggcaggtggcattggcattagggccccacctgacgttcaacgccccttgatcatgtgcaacccgcacaaaggctttgccgccctggccgaccacgccgacgctggcgccgctttcatcaaacacatccgaaccgaacggcagcaggctgccatcctcacgccgtgcggtaatcaggatcgcctggccgctgacggtctcgaactgcagcttcaccaccgaacctgcacgaggcgcgacgttttgtgcggccgtcttgagctcgacatcgacggacaggtccttggggtccagttcgacgacgttctggcggtatggcgtgaggtggggcaccacggcgtaaccgctcgtaccgacctgggcgctgtggttgccgttgatgcgtgcgccctgtgcatcgggggcctggaccaggccaatggtgtcgcccagttccggggcgaaggtcacgccgcctgcgtgggcgaccacaccgccggtcatgccgagggacgctgtacggtaggtgttgctttgcccataactggcggacagcacgccctgactggcttggtacttgatgtcggcactggcggaactgccaccgccctgggtatggctgccacccacgccgtaggtgaattcgttgcggtcgcccaggctgccaccgaggttggcgcgctcgccgctgcttcgattgccgcgatacgccgtggtggtcagggttggcgagcgagggctgctgcccagcgggaagctcaggctcagctcgatttgcttgtcgacgcggtcactcagcaagtctttggtgcgctgggcgctgagggtgtagtgcaggccgttccagctgccggtgtagcccgtggtgaaggtcaggttgccgcttctgcggttccagtagttctgtgaggaaccggtcaggtacaccgagccgttgcccaggctctggttgaggctgatgtccatccggtcgcgcaggcgtgaaacgttgtccaggctacgatcgtcgatggcaaggtcgcgcacccgtgcggcgtcggccacgctcaggaagccctccgtggagtaacggtaggcgccgagggcaaagtgggtgccggtgtcggtaaagttcttgctatagcgcaactgcacgcttcgcccgccacgggagtcgtggcccggaagcttcgcggaggagttggtcaggtcaagcgacagcgcgccgaaaggcgtgttgaaagccgcccccagcaactgcgattgatagtcttcgcccatcaccacgccggtgtagccggtcagcaggttgctgaggccgtgctggtaagtggcttgcatcaaggtcggcgggtagcgcagcccgatttcatccagcttgccgacactcaacgagtagcggctgtagccggcgcgcaacaggttggcgttggcggcaaagggcacaatgaactcacgcttgcggccatcggcctcggtaatcgtgacggtcaggtcaccgccatagcccgtggcaaacaggtcgttgagcacaaacgggccgggagccacggacacttcatcgagcagcacaccgcgctggcgcacggtgacccgcgcgttggtttcggcgatgccacgtacgaccggtgcgaagccagtcatagagtcaggcagcatccggtcgtcactgaacaggctggcgccccgtaagcgtacgctgtcaaacagctcgcccgaggtaaagatctcacccgccaccaattgagagcgcagcggggccagttcgcgctgcacgtaggtgctgctgctttgatagccggcactgctatcgttgcggctgaaactgccgttgtgtcgccagtgccattcacccaggttgaggccggtgttcaagcccaggtagtgggaatcgatggtgcggccattggtctgtgtcgcgaaggagttgacgttgtagcgcacaaaggcggcatcgatgccgctgtcccagtgcttggggtcgacataaccccttgcctggcgcagcagatagatctgcggcacctgcagttccaggcggttctcgcccgagtcgaactggctgctgctgccgggcaggtaggtggcgatgtcatcgcaacgggaaaactccggcgccgacggctggccggcttcggcgggttgattcttcggcgcgtccaggtcgatgccaaagcggacaagcgcgtcgcgctcaaggcacatctgcgcggagtcctggccttcaacggcgacgaagaccagggtttcacgcccgatccactggccgttgaggtagacatcggtgcggtaagtaccgggcagcacgatgttgccgcggctgaattttgaaatatcgacctgctggtcgaccgcccgatccggaaagaaggcggggttgaactcgacattctcggcaccgtaggcggccatggcattggcgctactgagcagcaacaggcagcgcgccatgagcatcgattgacgacgtgacagggatccggcgcttacgctggcaggcgtgttggaactcatgtttaccattctcaaaaataaggactgtccgaattcgggcaaagggaacccctgcccaaaaaaagaggcatcaaccgaatgtgtgtaacgaagtggatagcgttgccagcggctggacggatgtcgccgctggcgtattcaggccgtcatttggcgagcttggcgcggtgggggatggttaccccaaagtcgtcgagcgtctggaactccacggtttgcgaggggctcggcggtgacttgaggctgggcagctcaaagcggttgcgtcctcccggcaccaccatgttgtccgtgccggacgccactgccttgcgggcatggcgttgctgtgcctccagcacatcgacctggtcgaacgtcacgtgatacggggtggggttatagacttcgaggacctggccctgctcggtggattcgcgccgccactgcagtttgcctggcgcctcctccacgctataaggcaaattcggcggacggaaaaacagcttgatccgcgagcgaaaagccagctgcaactgattattctgcggggaaccttgcgcctgggaaggcacctccagcacgttgaaccagaacaggctttcctgtttcgacggcagggcttcccccgtatacgccaggcgcacgacctgctgtttgccgggctccatgcggaagatcggcggtgtggtcacgaagggtacgcccgccagatccggcgtcgagtactcgtcgccattgtccagccaggcctggatcagcaccggcgcctgattcttgctttcaagccgaaccgtgacttctttgtcgttctgcgggtagacaatgcgggtgttgccgatgacaacactcgcgtgtgcgacggcagtgccgaacagcgcgaaggcgactgcgatgaacctgggcaggtgtgtgagagacattacgttcatggcggtgctcatctcacggctgaagggctaaggctcgccgagtggcgaacgcgggcgccgaagtcgctgacgctggtgaattcgactttgggcgtgccgctggggcgatcgcgcaactgcggcagcgcaaacagtttcacatcgccggacggcatcaacagaccgtcattggggtcttggttcgcggctttgctgaaccgtttgccttggctcagcaggtcaaccgatgtcagcgaaatatggtaaggcgtcgggttggtcgcttgcagtgcgtagccgttattgtgaggtaccagctgccattgcagtttcgaaggggcgctggccaccgggtagggcaacgattgagggcgcaggaacacacgcaagcgggtccgaaacgccaactcgatctgattgttctgctcggcgcccgctgtcaccggtggcacctccaacacgttcagccagtacaggctttcccggtcggtgggggcgggctcgccggagtagcgcaagcgcaatgcctgctgttgatgaggctcaatgcgaaagatcggtggtgacaacgtaaacggtgtttgcgccgtcgcgggtgttgagcggatgtcacccgtatccagccaggcttgcaccagtgcgggtcggtcccctctattctccagccgcacgacgacctcttgatgttcggccgggaagatcacgcgggtcccatagataatcacccctgcatgggccggcatcgctttgagcgacagcaacccaacggcacaggtggcaagcgcaaggcgagccatttttttcatagtgtcgcaactcttcgaatcggggggatggacctgcctgactgcggcaggcccgtttcatgcgaggcctgctggcgcaggcccattggtcccttaatcggcgtacacgaccatgaagccaacgcgagtcttgaccgtgccctctgtggcgggagcggtggcgtacatttgcgcggccagtggaatcactgcctggttgtcggcgatcaccacgccttccgatttctcggtgtacacgtggattggcgtgccatcgcggttggtcacttcaacctggacgttcttggcgttggcggtgtcgtccgggtcatcgtagccatcgatgttcaagcggccggtcgccacgtcaatggcggggctggtagggtcgaacgcaaccatggcggtgcgaccgttggtgcaactgccttcacctggcgcaccaatgcgaatggtgaaaccggtcaggttggcgcgatcacccggcctggccaggcgtgctgccgaaacgccacccaggttgacgtccttgaccactgccccggtgcccggtgccgaaccttcaaccgtgcaggtcacatcgttcactaatccagtgaaattgatggtgccgtcattggcagcgtgtgcggtttgcgatgcagcagcggccagggcaatagcggccgcgagggtagagagcgtgttgaatttcatagtattcccacttcgtgaattatctttttgatccgccacaggcagcgatcgctgcaccgggttttatccaagtggcggagcacataatgtgtcgtggaaagagtatgttgcctatagagaagtctctagatttgcctcgtgattattcgaaaatctcctggctgattcaaagtagttgtatttactttttttgtaagagtgggatgtaagacgcagctgaaagaaaaggacttattattgttgcgtgttgatacctgcgtgtagctgggatataccgtgctcgaactaaagagagaatgttcgtaatgagcggtaatcacttgagcgggtttcttgatgcctacttccacatccaatatacacaccatcatgttgcttgatgatcatgagatggttcgacaggggatcgagctggggttgggcaatgaggcagaccttgcggtgatcggctctttcggcacgggcaaggagttgctggaggctttggcgctgaggccggcggatgtggtggtgatggacttcatcctcggcccttccgacctggacggccttggcttgatccagacgttgagccgacgcttcaggcaatgcaggccgattgtcgtatcctcgcactacaccccggcgaccgtttcattggcgttgaaggcgggcagttggggagtcttgggcaagacccagaaactgacggagttaatcacggctatccgaacggtcgcccaaggccgtatctacttgcagccttgtatgctgtcggccatccagggcatgcagcctgtttctgagatgggcaacatgaaatcgaaaatggacccatcaagttcattacggctgaacaccagcctcacacccaaggagcaagaagtattgcgctgtttcctcgatgggatgtcagtgagttcaattgcggcaaagttttcgcgcagcgcgagtacgatcagcacgcagaagcaatcagcctatcggaagttgggtatcaagaccgacagtgaacttttcaagtttactcagcagtttgacgtacttgaatagtgaaaaggctgtaagaaagttttcttgcgctcgaaagttaattcgcgttgtccaggtaacttagcgctaattgttcaatagcctgtcgcgccggcgacaacaagtgcggcgcgaccagcatcatgacctggtagaccgccactcgcacttcgccctcccggtcgagaatgcgctggtaatccagggagaacagcaaggtcatggtgatctgttccaccaattgccccagtgcctgggtgtcgctggccaactggccggcggccttcaatcgcgcgagcagggacgccagggtgcgctttagcgccgtgagcaggttgcggatgcccttggccaatttcggcaggcgtcccgccaggtttgacaggtcctggaacaggaaccggtaatgcgccatgcgctcgacgatcaggtgcaggaacagccagtaatcctgtggttccagttgcgcgtctgccggtgggtcgagcaagggcgtcagttcattctggaagcgctcgaacagcccgagcaccaagggctccttgccatggaaatggtagtagaggttgccggggctgatccccatttcattggccacctccatggtcgacacgttgggttcgcccttctggttgaacaattgcagggcacattcaaggatacggtcgcgggtcttcatccagtcttcttaatgtgatcgttgagctcagcgtacgcgcacgtaagtgcccggtgccgcttccatcggtgggtaattctggttgcccagggcggtgagggtttcgcgttgcacgccggaacgctgctggatccactccagccaccgcggccaccagctgccttcgacatggtcggcgtcgtagtaccaggcacgtgggtcgctgctcagcttgaggttctcgacgtagttggccttggggttgcccggcgggttgagaatgctctggatatgcccgctgttggacagcacgaagcgccgctcaccgcccagcaattgggtggagcggtacaccgcatcccacggcgtgatgtggtcgttgatgccggccacgctgaaactgtccactgtgaccttctgcaaatcgatgggcgtgccacagacttccaggccgccgggatggctcagcgggttgtgcttgaagaagtccagcaggtcgccatgcagggcggcgggcaggcgcgtgttgtcattgttccagtacaggatgtcgaaggccggcggttccttgcccagcaggtaattgttgatccagtagttccagatcaggtcattggggcgcatccaggcgaacaccttggccatgtcacggccgtcgagcacgccttgctggtaggagcggcgcttggcggcttccagggtctgctcgtcggcgaacagggtggcggggctgtcgatctggctgtccagcaggctcaccaagtagctcgcgctggagatgcggcgcagctggcgcttggcttgcaggtggccttgcagcgcggcgatggtcaggccgccggcgcaggcgcccatcaggttgacctcgcgggcgccagtgatcgcgcggcagacgttaagcgcttcctccagcgcggcgacataggtggagaggccccattcgcgatgccgcacatccgggttgcgccagctgaccatgaaggtctgcaggccgtttttcagggcgtactgcacaaagctgttggccgggctcaggtcgaagatgtagtacttgttgatctgcggcggcaccaccagcagcggcttggcatactgtttttcgctcatgggcttgtactggatcagctccagcagctcattgcgaaacaccactgagcctggggtggtggcgaccgtcttgcccacttcgaaggcgtgcttgctgacttggcgcggcaggccattgttgtgcagcaggtcctcgaacaggttgctcaccccgcgcaccacgctgttgccgccggagttgagcagctccttgatcgccaacgggttgagcaaggtgttggacggcgagaccgcatcgttgagcaacgagaaggcaaagtgcgcacgggctcggtcatcggcgctgagggtgctgtcatcgatccagtggcgtgtctgcttctgccagctcaaataggcctgcaggctgcgccggtacaggggatttagcttccaggtggggtcgttgaagcggctgtcgttggggttgggttcgtgcacggtttcaccgagcagcacgcgccccagttgcccgctcagcgcccaggcatgccgaacggtatgcaccgggttgcgcaagccatgggcagccacgctgcgcagcgtcgacagcaaatcccggccgcgcaggccggtgatcgcattttgcgcgttgatgaacgcggcgggtgtgggcgccgggttcgtcacgggtctttctcgcatgagccaacactccttcgtcaagccatcaaacgggcacgccaattcagaaccatagtcggttcctggcaagttgcgcggcagtgtggtccttacacggccggtcgcggatgaatcaccgcgcgcatgcgctcctcttcaagaaacttcatgatgatcggcgccacggcttcggcccgggtgatcaggaacaggtggccgtcatcgatgatgtgcaactgtgcattgggaatgcgccaggcgagcatgcgcatgttgatcagcgggatcagcgggtcatcgtcccccgccagcaccagggtgggctggcggatcttgtgcagccagtggatgctggtccagcccagcccggcgaacagttgccagtagtagccgagcttgccggccgaacgcactttgctggcgtgttcggcggccagtttcgaatcgcggcggaacgaaccgccgtagatcatcggcgcgatgcgcaccacgtgggacggctggatgtagcggcgcgggctggccatcagccacagtaccttcggcttgcccggcaccatcaccgcacccgccgccgtggctgcgaggatcaacttcttgcaccgctccgggtagtcataggcaaactgctgcgccagcgcgccgccccaggacacgcccaccgcattcacctggccatagtccaggtaatcgagcatacgcgcggtgagtttggccaaaccgggaaagcggtacggccgattgggcgtcgacgaaccgccgacgccgggcacgtcgaaggcgatcacttccaggtccgggtccagtgcctggatgaacggaaacaccagctcaaggttggcgccgatgccattgaagatcagcaacggcgtcaagtgaggcttgccggggcgtaccgccgtgcggatggtctggccatccaggtcgatggtacggaagatgaacggttgcggcatgctcaaaccctgtgaagtgttacagccggaatgcggtcaatgtgggagggggcttgcccccgatagcggtgtgtcagttacagttgtatcaacggacagtcagccatcgggggcaagccccctcccacatttgaatgcatttcaatttagcgttcgtgtacgtaggtgcctggcgccgcctctgctgcggcataggttttattccccaaactcgtcggcgctttcttcaacttacccgctcgctccgcctgccacgcctgccaatgcagccaccacgaatccgtatgcttggtcgcattctcctgccactcaagcggcttgcccgccaggccatcgctggtctggtagcgcgccttggggttgcccggcgggttgaggatgctctggatatgcccgctgctggacagcacgaactcgaccttgccaccaaacagctgcgccgacttgtagcaggattgccacggcgtgatgtggtcgttggtgccggccagtgaatagatatcggcggtgacctgcttgaggtcgatgggcgtgccgcacacttccagggcgttggcgcgtaccaatgggttgtttttgaacagctcgatcaggtcgccatggaacgctgccggcaagcgcgtggtgtcattgttccagaacaggatgtcgaacaccggcggctcgttgcccagcaggtagttgttcacccagtagttccagatcaggtcgttggggcgcatccaggcgaaaaccttggccatatcgcggccttcgagcacgccggcctggtaggaatggcgcttggccgcctccagggtctgctcgtcgacgaacagcgccacctgggtgtccagcgtggtgtccagcacgctcaccagcagggtcagggcgttgaccttcttctcccccagcgccgcgtaatggcccaagagggcggtgcaggtgatgccgccggagcaggcgccgagcatattcacgtctttgctgccggtgatcgcggtgaccacatcgacggcttctttcagcgcttcgatataggtcgacaggccccattcgcgctgggccttggtcgggttgcgccagctgacaatgaacgtctgctggccattgcgcaggcaaaagcgcgccaggctcttctccgggctcaggtcgaatacatagaatttgttgatctgcggcggcaccaccagcagcgggcgttcgtgcacctgttcggtgatcggcttgtactggatcaactccagcacgtcattgcgaaacaccaccgcgccttcggtggtgcccagggtcttgcctacttcaaaggcacccatgttgacctggctgggcatgccgccgttgtgcaccatgtccttggccaggtgggacaggccgtcgagcaggctcttgccgccggtttcaaagaaacgcttgaccgccgccgggttggccgcgctgttggtaggcgccatggcttcggtcatcaggttgatcacgaagtggccgcggctgatgtcctgttccgacaggttgctgtcgccgatccagtcgtgcagttccttgcgccacgccaggtaggtttgcaggtagcgcttgtagagcgggttctggctccaggccgggtcggtgaaacgacggtcatcgctttccggcaccagcgcggatttgccaaacatcacattcttcagttcgacgccaaaatgggcgacgtgcttgacgctgtgcaacggttgcttgatggcttgggtcagcaccatcttcgccgaagcgagtaaatcctttttacgtaacgcgatgatcgggttgagccccagagtgttttccgaggcctggcgtttcaagtcatcgttgttcttgttactcatctacgacgctccattgtccgaaagacgagtaccggggaccgctgcgcacccagtttcgatacacaacacaagcctggtactgcgactcgggtgaccgttgataccacatcgtcaaatgcagggaacttgccagttccattggttacccgagtttaatttttttcgcaagcgggccaatcgttggccacgcgacagggcattcaagcagatgaaattagaaaatgcgctctaaagagcaagacgcctgagctagagcatcagccgtacgaccgactcgctcgggtcgcgggttttgccggcggctttgagttcggcaagatagtcggcccacagtgcgtcctgacgcacggccaactggtagaggtagtcccaggtgaacagtccgctgtcatgcccatcgtcgaaggtcagtttcagtgcgtactggccggccggttcgatcttgaccaacttcacgtggagcttgccgaattgcaggatcggcttaccgtggccctggacctcggcggaaggcgagtgggtgcgcagcagttcggcaggaagctggtacacctcgtcgggcccgtaagtgaggctgagggtgttggaggttttgtgcaggtttactgcagtaggaaatttggtcattgatgatcatcctgaacgaaccgacatcaaaatgtgggagggggcttgcccccgatagcagtgtgtcagtcagcccatctggtactgatacaccgctatcgggggcaagccccctcccacaataaagcaaagcagttctgagtgaggcttacagaatgtagcgcgacaagtcttcgttctgcgccaattcgcccaagtggctgttgacgtattcagcgtcaatcttgatcacgtcgccattctgcgcaccggccaggtcgccagcactgaaggatacttcctccagcaagcgctccagcaaggtgtgcaggcgacgggcaccgatattctcggtcttctcgttgacttgccacgcgatctccgccaggcgcttgatgccgtctggctggaactcgatgcccagaccttcggttttcagcagttcacggtactgctcggtgagggacgcgtgcggttcgctgaggatacgttcgaagtcgcccggggtcagcgccttgagctccacgcgaatcggcaggcggccttgcagctccggcaccaggtcgcttggcttgctcaggtggaacgcaccggaggcgataaacaggatgtggtcggtcttgaccatgcccagcttggtgttcacggtgcaaccttcgatcagcggcagcaggtcgcgctgtacgccttcacgggacacatcgacgccgccggagttaccgcgcttggccaccttgtcgatctcgtcgataaacacgatgccgtgctgctcgaccgcctccagggccttggccttgagttcttcctcattcaccaggcgcccggcttcttcgtcgcgcaccagtttcagcgcttccttcaccttgagcttgcggcttttcttctttcccttgcccatgttggcgaacaggttctgcaattggctggtcatttcttccatgccaggcggagctgagatgtcgacgccggacacttcagcgacttcgatctcgatttccttgtcgtccaactggccttcacgcaggcgcttgcggaacagctggcgggtgttggaatccgaagccggtgcggcgtcttcgttgaagcccatgcgtgccggtggcagcaaggcgtcgaggatacgttcttcagcggcgtcttcggcgcgatggctgaccttggtcatttcctgttcgcgcagcatcttcaaggcagcgtcagccaggtcacggatgatcgactcgacgtcacggcccacatagcccacttcggtgaacttggtagcttcgaccttgatgaacggcgcgttggccagcttggccaggcggcgggcgatctcggttttaccgacgcctgtagggccgatcatcaggatgttcttcggcgtcacttcaacgcgcaattcttcgggcagttgcatccggcgccagcggttacgcagcgcgatggctacggcgcgcttggcatcgtcctggccgatgatatggcgattgagttcatggacgatttcgcggggagtcatggacatagtgtttggcggcctcaagcgggaataagcctacggcttactcggcgaggtcctgctcctcaatggtgaagttgtggttggtgaacacgcagatatcgccggcgatacccagggcggtctcgacgatttcgcgggccgacaggtcggttttcttcaacagtgcgctggctgccgcctgggcatagccaccgccggaacccatggcgatcaggccatgttcgggctcaaccacatcgccgttaccggtgatgatcagggacgcgtctttgttggcgacggccagcatggcttccaggcggctgagggaacggtcggtgcgccattctttggcgagttcgacggcggcgcgcacgaggtggccctggtgtttttccaactggccttcgaaacgttcgaacagggtgaaggcgtcggcggtagcgccggcaaagcccgcgagaacctggccgtggtacaggcgacgcactttcttggcgttgcctttcatcacggtattgcccagggaaacctggccgtcgccgcccatgacgactttgccgtggcgacgtactgaaacgatggtggtcaaggggagagtctccacgcagcggggcgaaaatgccctgatggaaactcatatgggggtggcgggnnnnnnnnnnnnnnnnnnnnnnnnnnnnnnnnnnnnnnnnnnnnnnnnnnnnnnnnnnnnnnnnnnnnnnnnnnnnnnnnnnnnnnngagggggcttgcccccgatggcagtgtgtcagtcaccgaaaatgttgactgatctactgctatcgggggcaagccccctcccacattctgatcggtgttgagcttgaatcagcggctctggcgttgttgtaacaacaggttgctaaagcccgcaccagccagttgcttctgcgctacagtcagttgttcacggttgctgaacggacccaccagtacgcgataccaggtcgcatccttcaccgtgccagactccaccgtcaccgactggcccagcagaatgatctgcgcccgcacgcgatccgcatctgcctgtttggggaacgagcctgcttgcaggaagaacttggttaccggcgcggccttggtctcggccaccggcggtgccggcggcggggtgatcccggccaatgcggcctgggcacgcgccgtgtcgatcttcgcggcttccgccggggtgaccggggtggtcggcacttgcggcgtcggcagggttttctccggcacggcgtccggcggcacgatcacttccgattcgggcaacagtgtgtagaagtcgtacttcggcttcaccggagcggtcgggctcggcgcagtcttgttggcttcggccattttcgtagccttctgctgctcctgcttgacccgtttgacgtcatcgcccttgcccggatccagtttcatcaggaacacgataaacgcgccgacggtgaggccgatcgccatccacaaccagcccgggatcggcttcttcgccggggcctggtagcggctggcgccgcgcttgggtgctggttttttcttggcagccaacttacatacgctccagtgtttccaggcccaacagttccaggccttgcttgagggtccgtccggccagggcggcgaggcgcaggcggctttgcttctgggcttcgtcgtcggcggtcaggatcgggcagttctcatagaagctggagaacaggccggcgacttcatacaggtaggtgcacaggatgtgcggcgtacctttctcaccgacgctgttcagcacttcgccgaattgcgccagcttggcagccagttcctgctcgtgcggggcgtccagcacgatgtgcccttcaacttcgctgaagtccttgcccagcttgcggaacacgccggccacacgggtgtaggcgtacagcaggtacggtgcggtgttgccttcgaaattgagcatcagctcgaagttgaagctgtagtcgctggtgcggtgcttggacaggtcggcatatttcaccgcgccaatacccaccacgcgggcgatgttgcgcaggtcggcctcggccaactccgggttcttttccttcaccaggttgtaggcacgttcctgggcttcggtcagcaggtcgatcagcttcacggtgccgccgtcacgggtcttgaacggacggccatcggcgccgttcatggtgccgaagcccatgtgctccatgtgcatcgggtgggtgacaaaacctgctcgacgcgccacttcgaagacttgttggaagtgcagggcctggcgctggtcgacgaaatacagcgcacggtccgccttgagcacgccactgcggtagcgcacggccgccaggtcggtggtggcatacaggtagccgccatcggccttgacgatgatcaccggcagcggctcgccatcggcggtcttgaactcttcgaggaacacgcactgcgcgccgttgctttccaccagcaggcctttggccttgaggtcgttgaccacgttgatcaggtcgtcgttgtaggcgctttcgcccatcacgtcggccatggtcagcttgacgttgagcagctcgtagatttcctggcagtgcgacagcgagatctcacggaagcggttccacagcgccaggcattcctgatcgccggcttgcagcttgaccaccaggccacgggcgcggtcggcgaactcttcggattcgtcgaagcgcttcttggcggcgcggtagaagttttccaggtccgacagctcgttgctggtgatcgggttctcttgcaggtaagccatcagcatgccgaactgggtgccccagtcgcccacgtggttctggcggaccacggtgtcgccgaggaactctagcacccgtgccacgccgtcgccgatgatggtggagcgcaggtggcccacgtgcatctctttggccaggttcggtgccgacaggtcgatgaccacgcgctgcagtgggccggccttgcgcacgccgatcctggcgtcggccagggctgcatccaggcgcgaagcaagggcctgggtattctggaagaagttgataaaaccggggccggcgatttcggccttggtgacgctttcgtcggcaggcagcgcggcgatgattttttccgccaggtcgcgcggtttcatgccggccggcttggacagcatcatcgcaatgttgctggcgaagtcaccgtgggtcttgtcgcgggtgttttccacctggatcgccggcgacaggccttcaggcaacacaccttcgttgacgagttgggtgagggcttgttggatcagctggcgaatggtgtctttcatggtgttctctttcgaccgcaagcggcggcgcgcgatgcgcaggtggaaaaactgggcattatccgtggcgagggcgggcttgccaaccttcgcgggacctgtggccagggttaatacaaatctaccgggtctacgtccaacgaccatcgcacttgccggccgctgggcatttgctccagggcaagcaaccagctacttaataggcggtgcagcggcgcacgggaggttgcctgcaaaagtagctgagcgcgatagcgcccggcacggcgctccatgggtgcaggcaccgggccgagcagttcgatgccgctcagacccagttcgcccagcaaacgttcggcggcgctgcacgcttcatccaggaagctctcggcctgccctggtttgtgcgcctcggcgcgcagtaatgcaaggtgggaaaacggcggcaggccggcggcgcgacgttcgctcagggcctgttcggcgaaggcgaagtagccttgctcggtcagttggatcagcagcggatggtcggccaggtgcgtctggataatcacccggccaggctcctcggcacggcccgcacggcccgcgacctgtacgatcaactgcgccatgcgctcgctggcgcggaaatccccggagaacagcccgccgtccgcatcgaggatcgacaccagggtcacccgtggaaagtgatgtcccttggcaagcatctgcgtgccgatgaggatgcacggctggcctttctggatggtggcgaacagctggttcatcgcgtctttgcgcgacgtgctgtcgcggtccacccgcagcaccgggtaatccgggaacaggatgcccaggcgctcttcggcgcgctcggtgcctgcgcctaccggtcgcaggtcgactttgccgcactgcgggcaatggcgtggcacccgctccacatggccgcagtggtggcagcgcagttcgccgtggcgctggtgcacagtcatgcgtgcgtcgcagcgttcgcactcggacatccagccgcagtcatggcacagcagggtcggcgcaaaaccccggcgattgaggaacaccagcacctgttgaccggcggcgagggtctggccgatggcttgttgcatcggcccggaaatgccgctgtccagcgggcggcttttgacgtccaggcgcaggaaacgtggttgcttggcaccgcccgcccgctcgttgaggcgtaggaggccgtaacgaccggtgtaggcgttgtgcaggctttccagggacggcgtggccgagcccagcacaatcgggatgtcttcctggcgcgcgcgcaccagcgccaggtcgcgggcgtggtagcgcaggccttcctgctgtttataagagccgtcgtgttcctcgtcgatgatgatcagcccggggtttttcatcggggtgaacagcgccgaacgggtgccgataataatgtcggcctcgccgtcccgcgccgccagccatgactccaggcgctcgcggtcgttgaccgccgagtgcaccagggcgatgcgcgcattgaaacgctgctcgaagcgcgccagggtctgcgggccgaggttgatctcggggatcagcaccagcgcctgtttgccggcttgcagggtctcgcggatcaactgcaaatagacttcggtcttgccgctgcccgtgacgccggccagcaggaacgcgtggaagctgtcgaagcctgcgcgaatcgcctcgtaggcggcgcgttgctcggggttcagcggcaattccggctgggccagccagtgttcgtggcgggcgtcgggggcgtgcttgcgaatttccacctgcaccaggcctttggcgagcagcaggtcgaggctgtctttgctcagcatcagcttgctcagcagctgatgcgccacgccatggggatgctgcgccagcgtggccagggcctcgcgctggcgcggcgcgcgggcgatacgcgggtcgtcgaggcgcgcgccgggcaccatcgaccagaagcgttcctggcgcgcttcggccagttcgccctggcgcagcagcaccggcaacgcccagctcaaggtgtcgcccaggctgtgctggtaatactgggcggtccacaggcacagcttgaacagcgcgggcggcagtggtggggtggcgtcgaggatggccagcgcgggcttgagcttctcggccggtacttcgctgtgatcggtgacttcaaccagaatgccgatcatctctcggcgcccgaacggcacgcgcacacgcatgcccggttgcaactgcgcccgcagtacgccggccggcgcccggtaatcgaacaggcggcgcaggggcgagggcagggctaggcgcagaatggcgtcgggcacgcggggagtctcatataaaggcaggcggtggcgcaggggcgggagcctagcagacaggggagggcttgggtatgccacggttttctgatgaaaggaggttttcagccggatgtgcggcttgcgcgattgaaaaggtctggtagaatccgcggcctaattacgtgcggtattcgacaatagtgtcgagtggcggcacgctagcccgaggaagtgccatgaaagccgatatccatccagcgtacgaaaccatcgaagtcacctgcagctgcggcaacaagttcgaaacccgttcgaacctgtgcaagccactgggtactgacgtatgcaacgagtgccacccgttctacaccggtaagcagaaaactctggacaccggcggccgtgtacagcgcttcgcagatcgctttggtgctttcggcaagaagcctgctgctactccagcagagtaaggctcaaaagccttatgggcttttgccagctgttgaaaaaggcgtcccttgtgggcgccttttttgtgcctgggatttggccttcagtcgcacaggccgacgtgttttgccccgcaccggccgccctggcccgggtggatgtgcagcgtgtggtggatggcgacaccgtgcgcctgaaggatggccgcagtctgcggatgatcggcctcaatgcgcctgaaaccggcaagaaaggccgctccgacgagccctatgccgttgcggcccgccagcgtttgcaggcgttggttgaggccagtggcggccgggttggcttggtattggggcgcgagagcaaagaccgttacggccgtaccttggcccacctttacggcgctgatggcgagaaccttgaggcgcaactgctggccgaggggctggggttccaagtgggcgtcgcgcccaacgtcgatctggtcacctgtcagcaggctgctgaaaacagcgcccgtcaggcgcgattgggcctgtggcgcaaatcacccgtgctaagcgtggcacaactcaagcagtccggcttcgccttggtcagcggccgagtgagcaagatcgaacgcaatcgcggcggaatctggatcgaattgcagggctcactggtattacgcattgcacccgaactcactcgccacttcgactccgcattgctcagtggtctgcaaggcaggacaatcgaagcccgtggctgggtgcaggatcgatccaaacggggtggccggaaaaacggtcaggcacgttggttgctgccactgaccgacctcagcatgctcaaatcgactgattaataaaaaattgtagacatttttttattcgattgtgaacagttaagcccttgtatcccgtggccttagaccaaagtacggcgctttggggccttgacacctgtgactacccagtcttgtagggactttgcgacacgcgtatcctcggcggtccgtcgaccaacagtaaaagcggaatgccgatatgtctgatttgaaaactgccgctctcgaatatcatgcccatcctcgtccaggaaagctgagtgtagagctcaccaaggccactgccaccgcccgcgacctgtcgctggcctacagccctggtgttgccgagcccgtacgtgaaatcgcccgcgaccccgaactggcgtacaagtacaccggcaaaggcaacctggttgcagtgatttccgatggcaccgcgattctcggcctgggtaacctcggcccattggcttccaagccagtcatggaaggtaaaggcgtgctgttcaagcgctttgccggcatcgacgttttcgacatcgaagtcgactccgaaagcccgcaggcgttcatcgacacggtcaagcgcatttccatcactttcggtggcatcaacctggaagacatcaaggcacctgagtgcttcgagatcgaaaaggccctgatcgaacagtgcgacattccggtattccacgatgaccagcacggcaccgcgatcgttaccgctgccggcatgatcaacgccctggaaatcgctggcaagaccctggctgacgcgcagatcgtctgcctgggcgccggcgctgcggccatctcctgcatgaagttgctggtgagcatgggcgccaagctggaaaacatcttcatggtcgacagcaagggcgtggtccagtccgagcgtaccgacctgaaccagtacaaggcgatgtttgcccacgccaccgacaagcgcaccctggctgacgccctcgacggtgcagacgtgttcgtcggcctctccggcccgaacctgctgagcgccgaaggcctcaagtccatggcggccaacccgatcgtgttcgcctgctccaacccggacccagagatctcgccggaactggcgcacgccacccgcaacgacgtgatcatggctaccggccgttcggactacccgaaccaggtcaacaacgtactgggcttcccgttcatcttccgtggcgccctggacgttcgcgccaagcgcatcaacgaagagatgaaagtagccgccgccaatgccctgcgtgaactggccaagctgccggtgcctcaggacgtgtgcgacgcctacggtggcgccaagctggaattcggtcgtgagtacatcatcccgaaaccaatggacaagcgcctgatcaccctgatctccgatgccgtggccaaggccgccatcgagaccggcgtggccaccctgccgtatccgaagcactacccgctgcaaagcgtggatgatgtgttcaacggctaagccgttgtagcgcaccaacaaaaagccccggttcttgcgagtcggggctttttgctgtgtggtgttcgccgatggcctttgtagtgagcgggcaagcccgctcactacaggtcagaacagatcgatcggcgccgcttcatctgccggcagcgggctacccggtgcaacgccattgcccagctcgttgaccgacggcggcgtgtcttcgctcttgaacagttcgaagtacgcgttcggcgtgcttggcgacgctgcacggccgctgatcgggtcgatgcgcaggctgaggatgccttccggctccggctgggtgtgcggcggcttgtccttcaaggctgcgcccatgtagctcatccagatcggcagcgcaacggtgccaccgaactcgcggcggcccaggctttccggctggtcatagccggtccacacggtggtcacgtagtcggcgttgtagccggagaaccaggcatccttggattcgttggtggtaccggtcttgccggcgatgtccggccggttcagcgccagagcgcggcggccggtacccttcttgatcacatcttccaggatgctgttgagaatataagtggtacggccgtcgacaatacgctcggcaactgccggcgcctgtggctccgccggggtaccgttggcggctggcgtggtgcctggggtcggctcgatggtgataccgccattgctcggcgctgccagcccatcggtggcggccacgccgttgaccacgtcgcctggcacgcgtggcgggttggcggtgaacagggtgtcgccgttgcggctttcgatcttgtcgatcaggtacggcgtgatcttgtacccgccgttggcaaaggtgctccagccggtggcgatttccatcggtgtgagggtcgcagtgcccagggccagggagaggttgggcggcaggtctgacttggcgaaaccgaagcgcgtcatgtaatcgatggtcttgcccacgcccattgcctgcagcaagcggatcgacaccaggttgcgcgacttgtacagcgcttcgcggatgcggatcgggccaaggaaggtgttggtgtcgttcttcgggcgccagaccttgtccaggtactcgtcgacaaacacgatcggcgcatcgttgaccaggctggcggcggtgtagccgttgtccagcgcggcactgtagatgaacggcttgaagctagagcccggttggcgcttggcttgggtggcgcggttgtagttgctctgctcgaacgcgaaaccaccgaccagggcgcggattgcgccgttctgtgggtccagcgacaccagtgcgccctgggccaacggcacctggctgaacttgaggctgtcgtccttctgacgttgcacgcggattaagtcacctacctgcgctacgtccgacggctgcttgggcatcgggcccatgctgttggtgttcaggaacgggcgcgcccatttcatgctgtcccacgccacatgggcttcgccggtgcgggtcaggacctgtacgccatctttcttgacctgggtgacgatggccggctccaggccgctgatcgcacgttgtttgcccagttcggtggtccaggcactcagggtcttgcccggcaggcgtgattcggggccgcggtagccgtgacgctggtcgtaggtgatcaggccggaatgcaccgaattattggcgatgtcctgcaagtcgctcggcacggtggtagtcacgcggaaaccttcggtatacgcctcgctgccatagcggccgaccatctcggcgcgggccatttcggcgatgtaaggggcgttcacttccggggttggtacgtggtagctggcgttcaacggctcggcgatggcgctttcgtaagcggcctggtcgatcttgcccagcttgtacatgcgtcccaggatccagtcgcggcgctctttgctgcgcgccgggttggccagcgggttgaagcgtgatggcgccttgggcaggccggcgatcatggccatctgcgccaggctggcatcacggatggacttgccatagtagacctgcgaggccgcctcgatcccgtaggcgcggttgcccaggtagatcttgttcacgtacagctcaaggatctcatccttggtcaactggcgttcgatctgcaacgccaggaggatctcggtggccttgcgcgaaaagctgcgctcgctggtgaggaagaagttcttcgccacctgcatggtgatggtgctgccgccggattgaatgtgtccgctttttaccaattgtgtggccgcacgcaccaggctgctggggtcgacaccatagtggttggcaaaattatcgtcttcggccgagagcagggcgctgatgaaattgggtggaatatcggcaaaacggatcggtgtgcggcgcatttcgccgaactccgcgatcagtttttcatcgctgctgtagacccgtaaaggaatctgcaactggatacttctgagggcctctacggagggcaaacccggactaaggtagaggtaggccccgctgagcacgagcagcagcccgcaaacgatggcgacaatggagtacccgaaaaacttcagcagacgaatcaaggcttttggatttccagagaaaagaatgggttaggcgtcggggctggcatggcaaacgatggatcgacccgagctgcagataaaaagcggcaaaaaacgctgggcattaaagcatttttcgacttggggcgtcattcgcacctgctcaacaagtcgaccgaatgcatgacgcccggcggcaatcaggcggtatgacaggcaaagctttagggagttttatgggaaaaggatttttcacgggaaaactcgacaccttgctgggcgtcgacatcaatgacacggcaatccggctggtggagctgggccgttcaacctctggttacaacattcgcggctacgtcacccaggcattgccgatacgctcggtggtcgacggcacattcctggatctcgaaggcgtgggacgcaccttgcgcagtgcattgtcacggttggcgacgtcggtccgtggcgctgccgctgcggtgtccgggccttcggtgatcacgcgcatgatcgagatggaggcggggctgactgacgatgagatggcctggatgatccagatggaggcagaccagtacattccttatccattggatgacgtggccatcgactttcaagtgcgtgggcctaccgccctggacccaggtcgtgtcgaggtgctgctggcggcgtgcctgaaggaacatgtcgaggcacgggaggcggttctggcgctggccgggctggtgccgagggtgatcgatgtcgaagcgtttgcattggcgcgcgcttgcagtcaggatttcgccagcttcacgccgagccatcgagtcgatggtgcacaatgggccgtggacgcccaggggatgggaattgcttgcgggttggccctgaggagtttcgcttgaagacacgaatcaaccttttgccttggcgccaggcgctggcggagcggcgacgcaagtacctgctggcgtgtttgctggcgttcgcctgcgcggcgcttgcggctgtgtggctggcggaccaggtgatcgaccaggccattgaccggcaagtgacccgtaatgaccatctgggcaagcaaatcaccggcctcgattcgcgcatcaggaccatcgacgacctgcaggagcaaagccagcagttggcacagcgcatgaaggttgtgcaggacctgcacgactcccgctcgtccggcgcgcaattgttggatcagttggcgcgcgcagtacccgatggtgtgcatctgcatgaagtggtggcgaagggcgatacggtgagtatcagcggcagtgccgaatccagccaggatatcgcccaactgatgcgtcgcctggaggccgcacaaggcgcccattccacgcggttgcaacaggtgcgaaccgaaggtgcgcggggcaacaatgaattccagttgatggtgcgacagggcgagcccgccgaggcgcaaccttgagcccgttgaggctcaatctttctgcactcactcacaacgctgcaaaatggcccctacctggcaaggccctgttgggctgtgcgctggcgagtctgatatttgtggtgggtgaccttgtttgcctgagcccgtcgcggcagcggctaagccaggtcgaggtgcgggaagtggccctgcaacagcaagtcgctgaaaagacggccctggctgccccccttgaggtgcgcacccagcagctccaattgatgcaggcgaaagcggatgagcttttccgggcgttgccggggaaatccgaaatgcccggcttgctggaagacatcgcgcacttggcagtggccaatggtctggtggtcgagagtgtcacgccatcggacgaacagtctcagccgtactatcacgagcagccggtacaggtcggcgtggcaggggcttaccacgacctggcgacgttcctgagtagcttgggtggtctggcgcgaatcgcgacggtgcacgatgttgtcctgcgacgtgatggcaatctgctgcgccttgatgtgctggtcaagacctattggcagccgggcggcgggggaggtggtcaggcccgccaggggcaactctttgtctacgaggcttccgggctgcgcgacccttttcaacggcttgccgttcaggtcgatcacctgcctgggcggcccgcgcgtgcgccagacctcgcccggccacgcgcagccctggaaagccttgcgttggaccagttcgaaatggtcggcacgctgtcccgcgggtcgcaggtcttcgccttgctgcgtgcggcctccacggtgcatcgcctggcggtcggtgactacctggggccggaccatggccgggtcacggccatcgatgagcgttacatagagctggtcgagctgtttcccgatggtcagggggcatggctggagcgcccacgaaccctggtgttaaacgtcaactcataacggaatcgaatcaatgaaaaggattttctcgtccttcggtgtagcgctatggatagcgttcacggcgccgatggctgttgctgtgcccaatcgtgtagacctgatccagttgccaccgcctggcaatgccacgtcgggcgcctacaccggcgataagctgaaccttaacttccagagcatcgagttgcgcaccgcgctgcaacagattgccgatgtagcgggcctcaatctggtagccagcgacgatgtgcagggctcgattaccctgcgcctcaaggatgtgccctgggatcaggcgttggacctggtgctgcaagccaagggcctggataagcgggtaaaggccggtgtattgctggtcgcgccggccgaggagttggcggcgcgtgagctgctgaccctggaatcgcgcaagcaaatggctgaactggcgccgttgcgtcgggagctgttgcaggtcaattacgccaaggcggcggacctggccaagttgtttcagtcagtcacgggccttgagggcgtcaccgacgagcgtggctcggtggcggtggatgatcgcaccaacaacatcatcgcctatcagactggcgagcggctggaggagctgcgcaggatcgtggcgcagttggatgtgccggtgcgccaggtgatgatcgaggcgcggattgtcgaggccaatgtcgattacgacaaaagcctgggcgctcgctggggtgggcggctcactcgcggcaactggggcgccggcggtattccgaagcctctggcggatggcgcggagcctgcggaaaacccacccagttcaccttttgtggacttggggtcactcaccggctcatcgggcctgggcatcgcctttatcaccgacaacctgctgctggacctggaactcaccgccatggagaaaaccggcaacggcgaaatcgtctcgcaacccaaggtggtcacttccgacaaggaaaccgcacgcatcctcaagggcaccgagattccctaccaggaatccagctccagcggcgcgacctcggtgtcgttcaaggaagcctcgctgtcgctggaggtcaccccgcaaatcacccctgacgaccgcgtgatcatggaggtgaaagtcaccaaggatgagcccgactacctgaacaaactcaacgatgtgccgccgatcaagaaaaacgaggttaacgccaaggtgctggtcaaggatggcgagaccatcgtcattggcggggttttctccactacccaaagcaaagtggtagataaagtgccatttttgggcgatgtgccgtatcttggccgccttttccggcgcgatgtgctggcggagaaaaaatccgagctgctggtattcctgactccgcgtattatgaataaccaggcgattgctgtgagtcgttgattctgtgcgaaatttgattcttgtaggaccgatgggggctggaaaaagcaccatcggccgtttgctggccaaagagctgcgcctgccgttcaaagattccgacaaggaaattgaattgcgcacgggcgccaatatcccatggatcttcgataaggaaggcgaactgggctttcgtgaccgcgagcaggcgatgatcgccgagctgtgcggctgcgatggcgtggtattggcgacaggtggtggcgcggtgatgcgtgacgagaaccgccgcgcgctgcatgccggtggtcgggtggtctacctgcatgcgtcggtcgagcagcaagtgggtcgcaccgcccgtgatcgcaatcgcccgttgctgcgtacggccaacccggagaaaaccctgcgggatctgctggcgctgcgagatccgctgtatcgggaaattgccgatctggtggtagaaaccgatgagcggccaccccggatggtggtcctcgacattcttgagcgcctgcaacggctgccaccccgttaaagccaggcccgaaatgcgctattctcggcggcgcgccaacacctcccaaggtgtggcgtagagccatcaggcgacgtcagcgtttgacgttgccggtcgtcaatacatcttcaacgcggggacacatgcagacacttaaggtcgatctaggcgagcgcagctacccgatccatattggcgaaggtctgctggaccagcccgagttgctcgcaccgcatattgccgggcggcaagtggcgatcatctccaatgaaacggtcgcgccgctgtatcttgagcgtctgagccgcagcctcgcggcgtactccgttatttctgtgatcctgcccgacggcgaggcccacaagaactgggaaaccctgcaactgatctttgatggcctgctgactgcacgccatgaccgccgcaccaccgtgatcgccctgggcggcggtgtgatcggcgacatggccggctttgcagcggcctgctaccagcgtggcgtggactttatccaggtgccaaccaccctgctgtcccaggtcgattcgtcggtgggcggcaagaccggcatcaaccacccgctgggcaagaacatggttggcgcgttctaccagccgcaagccgtgctgatcgacaccgcgaccctcaacaccttgccgccgcgtgagctgtcggcgggcctggcggaagtcatcaagtacgggctgatctgcgacgaaccgttcctgacctggctggaagaacatgtcgacgcgttgcgcaacctggaccaggcggcactcaccgaagctatttcccgctcctgcgccgccaaggcgctggtggtgaatgccgacgaacgggagtccggcgtacgggccacgttgaaccttgggcacaccttcggccatgcgatcgaaacccacatgggctatggtgtgtggttgcatggagaggccgttgcggctggcacagtgatggcattggagatgtcgcagcgcctgggctggatcaacgcccaggagcgtgaccgtggcatccgcctgttccagcgcgccggtttgccggtgattccgcctgaggaaatgaccgaggcggatttcctcgaacatatggcaatagacaagaaagtgatcgacggtcgactgcgactggtgctgctgcgccacatgggcgaagcggtggtgaccgacgattatccgaaagagattttacaggccacgctgggagcggattaccgcgccctggcccagcttaaaggttaataagatcccgatgactagtttgcatgccgacgaggcgttcctcggccattaccagttaagccacgacccttttgctccacgggtgcctggtttcaaatttttcccggcccagcgcaagccagtgctcggtcaactgcaccatctcgcgcgctacagccagttgctgctagtcgtgaccggcccgctgggcagcggcaagaccctgctgcgccaggccctggtggccagcaccaacaagcagtcggtccagagcgtggtggtgtcggcccgtggtgccggtgatgcggcaggtgtcctgcgccaggtcgcccaggcactggacgtggccactgccgagccgaacgcgatcctcaagcaggtggtgcagctgggcctgaccggccaggaagtctacctgctggtggatgatgccgagcagctcgacgaatccgccctcgaagcgctgctggcgctggcggcgggcacgccggaaggccgtccgcatgtattcctgttcggtgagtcgtcgctgatcgccgacctggagcagatcagcggtgatcaggagctgttccacgtcatcgaactgcagccgtacgaagaggaggaaacccgcgaatacctggctcaacgcctggaaggtgcaggggcgggtatcgaacttttctccgctcaacagatctctgatattcacgaaagctccgacggctggcctggcaccatcaaccaggttgcccgcgatgccatgatcgaagccatgattgccagccgcaccgcggtcaagcgtccaaagatggggttcactatgcctaagaaacacgtattggctatttccgccgttgttgtggtcgctgttgccgccgcctggttgattccgggtcgcagcaaggcgccgaccaccgccggtgcgccaaccgagcaggcgcaattgccactgggcaaacccacgccaaatgttgagttcgccaattccggccagccgaccaacctgccgatggtcggccagcctgtcatgcgtggcccgctcgccgaagaagccggtggcatttccgaaggcgacgacggcgtgccggtggaaggttccagcgccacaccgccgaccgtcacgaccacagcaccacctgctggcgtgccagccggtcagccagcggcaaaaccaacgccggcaccgactgttgcaaccgccaagccagcgcctgtgaccaagccggtcgcgcctgcgccagccgccaagccagcgccagccccggccgccaagcccgctgaaaaaccagctgccaccgttgccaaggccggtgctgcgggtagcggttggtacggcagccagccttccggtaacttcgtggtgcagatcctcggcaccagctctgaagccaacgcccaggcgttcgtgaaagagcagggcggcgagtaccgttatttcaagaaagtgctcaacggcaagcctctctacgtgatcacctatggcagtttttccagccgtgcagcggctgattctgccatcaaggccttgccagcgaaggttcaggctggtaaaccttggcctcgcactgttgccagcgttcaacaagaactcgcaacaactcgctgaagatcaggcggccttacccaggccgccctcccggcacctcaaaaaaactacaacagcgtgcagccctgaaggccgcgcgctttgtggtgtctgcgtcacagtggcttttgagtcgtagcggtcagaattaaaaaagttttgactagcacagcatatcgctttaaacctttcataaatgcgacatagatttgcgacatttcgtcgctaaatttgtgagcgtctgtgtcggtgtgtacaatgacctcccttttgcccccgctaagccggcgtacgttcggcgtggaaggtaaccggttgaattgaaaagaaatttgcctcgaaataagaggcagcctggtgagaaagtgtctatgaaagcaggtctgtaccaacccgatgaattcaaggataactgcggtttcggcctgatagcccatatgcagggcgagcccagtcatacccttctgcaaacggccatcgaggccctgacctgcatgacccaccgcggtgggatcaacgccgacggcaagaccggtgacggttgcggcttgctgattcaaaagcccgacctgttcctgcgcgctgtcgcaaaagagcaatttgcggtcgacctgcccaagcagtacgcggtgggcatggtgtttttcaaccaggacccggtcaaagccgaagctgctcgcgagaacatgaaccgcgagatcctggctgccggcctgcaactcgtcggctggcgcaaagtgccgatcgacaccagcgtactcggccgcctggccctggaacgcctgccgcagatcgagcaagtgtttatcgcaggcgatggcctgagcgaccaggacatggcgatcaagctgttcacgtcgcgtcgtcgctcgtccgtggccaacgccgccgacaccgaccactacatctgcagcttttcccacaagaccatcatttataaaggcctgatgatgccggcggacctcaccgccttctatccggacctgagcgatgagcgcctgcaaaccgcaatctgcgtgttccaccagcgcttctccaccaacaccctgccgaaatggccgctggcccagccattccgcttcctcgcccacaacggcgagatcaacaccatcaccggtaaccgcaactgggccgtggcccgtcgcaccaagttcgccaacgacctgatggacctggaagagctcggcccgctggtcaaccgcgtgggttccgactcctccagcatggacaacatgctcgaactgatggtcaccggcggcatcgacctgttccgtggcgtgcgcatgatcattccgccagcgtggcagaacgtcgagaccatggacccggacctgcgtgcattctacgagtacaactcgatgcacatggagccgtgggacggcccggccggtgtcgtgatgaccgacggccgctacgcggtctgcctgctcgaccgtaacggtctgcgcccggcgcgttgggtcaccaccaccaacggtttcatcaccctcgcgtcggaaatcggcgtgtgggactacaaacccgaagacgtcatcgccaaaggccgcgtgggcccaggccagatcctcgccgtggacaccgaaaccgggcagatcctcgacaccgacgccatcgacaaccgcttgaaatcccgtcatccgtacaagcaatggctgcgcaagaacgccctgcgcatccaggcgaccatggaagacaacgaccacggttcggcgttctacgacgtcgaccagctcaagcaatacatgaagatgtaccaggtcacgttcgaggagcgcgaccaggtgctgcgtccgcttggcgaacaaggctacgaggcagtcggctccatgggcgacgacacgccgatggccgtgctgtcccagcgcgtgcgcacgccgtacgactatttccgccagcagttcgcccaggtgaccaatccaccgatcgacccgctgcgcgaagccatcgtgatgtccctggaagtctgcctcggtgccgagcgcaatatcttccaggaatcgcctgagcacgcctctcgtgtgatcctcagctcgccggtcgtgtctccggccaagtggcgctcgttgatgaccctggagcgtccaggcttcgaccgccagatcatcgacctgaactacgacgaaagcctcggccttgaagccgcggtgcgcaacgtcgccgaccaggccgaagaagccgtgcgcgccggtcgtacccagatcgtcctgaccgaccgccacatcgcgccgggcaagctgccgatccacgcctcgctggcgactggcgcggtgcaccaccgcctgaccgaaaaaggcctgcgttgcgactccaacatccttgtcgaaactgccacggcccgcgacccgcaccactttgcggtgttgatcggcttcggcgcctcggcggtgtacccgttccttgcgtacgaagtgctgggtgacctgatccgtaccggtgaagtgctgggcgacctctatgaggtgttcaagaactaccgtaagggcatcaccaagggcctgctgaagatcctgtcgaagatgggcatctccaccgttacgtcctatcgcggtgcgcaactgtttgaagccatcggcctgtccgaagaagtctgcgacctgagcttccggggtgtgccaagccgcatcaagggcgcgcgtttcgtcgacatcgaagccgagcaaaaagccttggcagccgaagcctggagtgcgcgcaagccgatccagcaaggcggcctgctcaagttcgtgcacggtggcgaatatcacgcgtacaacccggacgtggtcaacactctgcaagccgccgtgcagcagggcgactacgccaagttcaaggaatacacctcgctggtggataaccgcccggtgtcgatgatccgcgacctgttcaaggtgaagaccctggacacgccgatggacatcagcgaagtcgagcccctggagtcgatcctcaagcgcttcgactccgccggtatttccctgggcgcgttgtcgcctgaggcgcacgaagcgctggccgaagccatgaaccgcctgggtgcgcgttccaactccggcgaaggcggtgaagacccggcgcgttacggcaccatcaagagctcgaaaatcaagcaggttgctaccggccgtttcggcgtgaccccggaatacctggtcaacgccgaagtgctgcagatcaaggtggcccagggcgccaagcccggtgagggcggccaactgccaggcggcaaggtcaacggtttgatcgccaagctgcgttacgcagtgccgggcgtgacgctgatttcgccgccgccacaccacgatatctattcgatcgaagacttgtcgcagctgattttcgacctgaaacaagtcaacccgcaggccctggtctcggtgaaactggtggcagaagccggcgtgggcaccatcgccgctggcgtggccaaggcctatgccgacctgatcaccatctccggctacgacggcggcaccggcgcttcgccgctgacctccatcaagtacgccggtgcgccgtgggaactcggcctggccgaaacccaccagaccctgcgcggcaacgacctgcgcggcaaagtgcgggtgcagaccgacggcggactgaaaaccggcctcgacgtgatcaaggccgcgatcctcggcgccgaaagcttcggcttcggtactgcgccgatgatcgccctgggctgcaaatacctgcgcatctgccacctgaacaactgcgccaccggcgtcgccacgcagaacgagaagctgcgcaaggatcactacatcggcaccgtcgacatggtggtgaacttcttcacctacgtcgccgaagagacccgtgagtggctggccaagctgggcgtgcgttcgctggaagagttgatcggccgtaccgatctgctggaaatcctcgaaggccagacggccaagcagaaccacctggacctgacgccgctgttgggcagcgatcacatcccggccgacaaaccacagttctgcggcgtggaccgcaacccgccgttcgacaaaggcctgttggccgagaagatggtcgaaatggccggctcctcgatcaacgacgccagcggtggcgaattcgccctggatatctgcaactgcgaccgttccattggtgcacgcatctccggcgaaatcgcgcgcaagcacggcaaccagggcatggccaaagcgccgatcaccttccgcttcaagggcaccgcgggccagagcttcggcgtgtggaacgccggcggcctgcacatgtacctcgaaggcgacgccaacgactacgtgggcaagggcatgaccggcggcaagctggtgatcgttccgcccaaaggcagcgtgtacaagacccaggacagtgccatcatcggcaacacctgcttgtacggcgccaccggtggcaagctgttcgccgccggtaccgccggtgagcgtttcgccgtgcgtaactccggtgcccacaccgtggtggaaggcaccggcgatcactgctgcgagtacatgaccgggggctttgtcgcggtactgggcaagaccggttacaacttcggttcgggcatgaccggcggtttcgcctacgtgctcgaccaggacaacaccttcgtcgacaaggtcaaccacgagttggtcgagatccagcggatcagcggcgaagccatggagtcctaccggaaccacttgcagcacgtgctggacgagtacgtcgaggagaccggcagcgaatggggtcgtaacctcgccgaaaacctcgatgattacctgcgtcgtttctggctggtcaagcccaaggctgccaacctgaaatcgttgctttccagcatccgtgccaacccgcagtgatatgcgcctgaagagtttgatgaggttttaacatggctgaacgtctgaataacgacttccagttcatcgatgtcgggcgcaaagatccgaagaagaaactgttgcgtcaacgcaagaaagagttcgtggaaatctacgagcccttcaaaccccagcactcggccgaccaggcccaccgctgcctggggtgcggtaacccgtattgcgaatggaagtgcccggtgcacaacttcattcccaactggctcaagctggtggccgagggcaacatccttgccgctgccgagctgtcgcaccagaccaacaccctgccggaagtgtgcggccgggtgtgcccgcaggaccgtctgtgcgagggtgcctgcacccttaacgacggcttcggcgcggtgaccatcggttcggtggagaagtacatcaccgacaccgcgttcgccatgggctggcgcccggacatgtccaaggtcaagccgaccggcaagcgcgtcgcgatcatcggtgccggccctgccggcctgggctgtgccgacgtattggtgcgtggcggcgtgaccccggtggtgttcgacaagaacccggaaatcggcggcctgctgaccttcggcatccccgagttcaaactggaaaaaaccgtcctgagcaaccgtcgtgaagtgttcaccggcatgggtatcgagttccgtctcaataccgaaatcggcaaggacatcaccatggagcaactgctcgaagaatacgatgccgtgttcatgggcatgggcacctacacctacatgaagggcggttttgccggtgaggacctgccgggcgtgtacgacgcgctcgacttcctgatcgccaacgtcaaccgcaacctgggttttgaaaagtcgccggaagacttcgtcgacatgaaaggcaagaaggtcgtggtgctcggcggtggtgacaccgcgatggactgcaaccgcacctcgatccgccagggcgccaagtcggtgacctgtgcctatcgtcgtgacgaagccaacatgcccggctcgcgcaaagaggtgaagaacgccaaggaagaaggcgtgaaattcctctacaaccgccagccgatcgccattgtcggtgaagaccgcgtggaaggtgtgaaggtggtcgagacccgtctcggcgaaccggacgcccgtggccgtcgcagccccgaaccgatcccgggttccgaagagatcatcccggccgacgccgtggtcatcgccttcggcttccgcccaagcccggcgccgtggttcgagcagttccagatccagaccgacagccagggccgtgtcgtggctccggaacaaggccagtacaagcaccagaccagcaacccgaaaatcttcgcaggtggcgatatggtgcgcggttctgacctggtggtgacggcgatcttcgaagggcgtaatgccgccgaagggatcctggattacctgaacgtctaatctcgttcaagctgaaatgcggtcaaaaatgtgggaggggcggtgcgacgactcgacgcaccgcccctcccacatttatttttgcagcgctttcaagcccgcgacaaattgacccgatagacaaaaggcacggctcataccgtgccttttgcgtctggctctgagaaaatgcccgcactttttttgcggatgccgacatgactgccctcaagaacgaccgtttccttcgtgccctgctcaagcaacccgtggacgtcacccctgtgtggatgatgcgccaggccggtcgctacctgccggaataccgcgccagtcgcgccaacgccggcgatttcatgagcctgtgcatgaacccggagttcgcctgcgaagtcaccatgcagccgctggaccgctacccacaactggacgcggccatccttttttccgacatcctcaccattcctgatgccatggggcagggcctgtacttcgaaaccggcgaaggcccgcgtttcaagaaagtcgtcagcaccctggccgatatcgaagccctgccgattccagacccacacaaagacctcggttatgtgatggacgccgttagcaccatccgccgcgagcttaatggccgtgtgccgctgatcggcttctccggcagcccctggaccctggccacctacatggtcgaaggcggctcgtcgaaagacttccgcaagaccaaggctatgctctacgacaacccgcaagccatgcacttgctgctggacaagctggcgcagtcggtcacgtcctacctcaacggccagatcatggccggcgcccaggcggtgcagatcttcgacacctggggtggcaacctctcggcggcggcgtaccaggagttctccctggcctacatgcgcaagatcgtcagcggcctgatccgcgaacacgaagggcgcaaggtaccggtgatcctgttcactaaaggtggcggcctgtggctggaaagcattgccgacgccggtgctgacgccctgggcctggactggacctgcgacattggcgaagctcgccgtcgcgttggtggccaggtcgcgctgcaaggcaacatggacccgaccgtgctgtacgccaagccggaagcgatccgcaccgaagtcggccgcatactggccagctacggcaaaggcaccgggcatgtgttcaacctcggtcatgggattactccggaagtgaacccggagcacgctggcgcattcctgcgcgcggtgcatgagttgtcagcgcagtatcacgaataacacgcaaaacaaatgtgggagggggcttgccccctcccacatcaaagccagagaaactcaggccttcgcttgccccaacggcggcaacttcgccaacttcaacgccaccagcaacgcgccaatcaacaacgccacgataaacgcgccgatcccgttccacccggcgaagtgccagaagaacccgcctgccgttccggcaacactcgaccccacgtagtagcagaacagatacagcgatgacgcctgccccttggccttgaccgcgcgacggccgatccagctgctggccaccgaatgggcgccgaagaagccgaaggtgaagatcagcatgcccggcaccaccagccacagcgggctgaacagggtcagggccatgccggcgagcatcagcacgatggtgccccacagcacgcgacggcggccgaggcggtcggcgagggagccgattttcgccgagctgtagatgcccgagaggtacaccagcgacagcaggccgaccacggcctggctgaggtcatacggatcgcccagcaggcgatagccgatgtagttgaacatcgtcacgaacgcacccatcaacaggaaggcttcgaggaacagccagggcaggccggcgtccttgaagtgcatgacaaagccgtccaccaggctgcgcggcttgaggctggtggcgcggaagttgcgcgattcggggaggattttccagaataccgtggcggcgatcagcgccagggcaccgatgatcagcattgcggtgtgccaactgacgaagtcgatcaacacgccgatgatcaggcgcccgctcatgccgccgatggcgttgccgccgatgtacaggcccatggccaggccgatgtgctgcgggtggatctcttcgctcaggtaggtcatggccacggcggccaggccgctcagtgacaggcccaccagcgcgcgcatcagaaggatgccttcccaggttggcatcaggccgctggcgatggtggccagcgcggcgcagaacagcgcggagaccatcaccggcttgcgccccagccggtcggagatcggcccggtgatcagcaagccgaacgccagcatcgccgtggccaccgacaggatcaggctgctttgcgccgcattgatggaaaattcgagggacagcgccggcatcatcggctgcacgcaatacagcagcgcaaaggtggcgaaaccgccggagaacagtgccagcaccgtgcgcatgaacatcggcgtgcctttttcgatgtacgcgtcattgagctgggccaccacctcatccaaggcagtgggcggtacgtcttgagcgagtggagcgacagcagctttcacggggacctcggggaggaagagcctgccgggaccggcaatgcaaaaaagaatatagctcgctaatgattctttccaatatattgttcgacctgtttgatagctttaacgacctaatgaggtttgcatggaattgcgtcacttgcggtacttcatcgccgtcgccgaagaactgcatttcggccgggccgcgcaggtgctgggcatctcgcagccgccgttgagccagcagatccaggcgctggagcaagaggtcggggcacgcttgtttgagcggaccaatcgtcgggtcgagctgagcgaggccgggcggctgttcttgcaagaggcgcggttggtactggcgcaggtcgacaaggcggcggatgtggcgcggcgggcgcagttgggcgaactgggggagttgaagattggtttcacttcatcggcacccttcaactccagcattccccaggcgatctttgcgtttcgccaggcgttcccggcggtgcacctcaatcttcaggaaatgagcagcaccgaagtggctgagtcgctgatggatgagtcaatccaggtgggcctgatgcggccgctgccgttgccggattccttgagcgtggtcgagttgatgcgcgaacccttggtggcggtgttgaacgcggggcatccgttggtgcacggcagtgaacgtggtttgcacctggcgcaactggcggacgaaccgtttgtgtttttcccgcgcacctatggcagtggtctctatgcgcagttgctgaacctgtgccgtgacgcgggtttcagcccgcacttcgcccaggaggcgggtgaggcgatgaccatcatcggcctggttgcggcggggctgggggtatcggtgctgccggcgtcgtaccagcgcatacggatcgatggggtggtgtatcgcacgctgttggaccaggaagcgatgacggcggtgtggctggtacagcgcagaggtgtgcagacaccgatggcgaaggcgtttgtggagttgttgacgcgcaaggctgcccaataacctccggcaagcaagttgttgtggcgagcgagctttttgtggtgagcgggcttgtcccgcgctggagtgcgaagcgctcccaagatctttggggccgctacgcagcccagcgcgagcaagctcgctcaccacaacagcccgctcgccacaggtactgcgttagtcgtcaaatcggcactttgccacgggttgtcggaaggctgttttcaggcatactgccccaagttcccgaaaggggcttgtgagactctgaggatcctgggcaaccagccatcgcagagccaggcaggaagcggcgatgacaagccaacctgtttgtgaagagggcgccgaatggcgccctttgtcgtttctggagcagcgccggccttaattctgtttggagctgcccgtctgctcaaacagctgcgccgctgccccggtcccgtccgcgccgttgttgcgcaaccccgccatgatgtcgcgatccagcatgctcacccagcggttgtagttgcgatggatcttgccatccttgtagcccagttcgcggctatcgcggtaggtgatggcgtagctgttgcgggtgtagcggatgtcgatggcggcgtagtactggttacgcacattgatctcggcctgcaccagttgcgggctcaggcgttgtaccgtccattcgcgcttttgcagggcgttgacgatcaccattttcattttttcttcgctgacctgggcgttggccggcaggtcgtgctgggtgttgaggatcggcttgctggtgcaaccggcggtgaccagcagggccagggtgatcaaggtgacgcgtagcaaggaagacattccgttttctccaatcgattaaaaagtcaggaccagcggcggaagatcagcgaggtgttgacgccgccaaaggcaaagttgttgttcatcacgtagtcgtggtgcatctcgcggaactcaccttgcaggtaatccagctcgccgcattgcgggtctaccgaatccaggttgaaggtgtgcacgtactggtcgcggttcatcatctcgatgctgaaccacgactccaacgcgccacacgcgccgagggtatggccgaggaaactcttctgcgaactgatgggcatgcggctgccgaacaggctgctggtggccagggtttcagcgatgtcgccttggtccgtggcagtgccatgcccgttcacgtagccgatcgcggacggctcaagcccggcatcttccagggccagctccatggcgcggcgcatggttttctgctccgggcgggtggtgtgctggccgtcggcgttgctgccgaagccgacgatctcggcatggatatgcgcaccgcgcgccagggcatgttcgagttcctcgagtaccagcatgccgccgccttcgccgatcaccaggccatcgcggccgctgtcataggggcgtgggctggtttgcggggcgtcgtttttcaggctggtggcgtagagcgcgtcgaacaccatggcttcggtggggcacagctcttcggcgccgccggcgagcatcaacggcaggcggccgaacttgattgcctcgtaggcatagccgatgccctggctgccgctggtgcaggcgctggaagtgggaatgagtcgcccggtcaggccaaagaagatgctgatattcgccgccgtagtgtgcggcatcatgcgcacgtaggagttggcattcagcccctcggccaccgagttcagcagcatgttgccgaacgccttgatctcgtcggtgctgccggtagacgagccgcaggccacgcccatgcgcccgtccttgatggattcatcgccgagcaaaccggcgtcctgcaacgcctgttccgctgcccacaccgccaggcgcgaaacccggcccatgctgcgcaattgtttgcgcgtccaatgggcgggcacgacgaagtcgtcgatcggcccggccaggcgcgtgttcagttccgtaaagcggtcccactcgtccatacgccggatgccgctgcggttggcgcggaagttggccgaaatggttgcccaatcgctgcccagggaggtcatgccggccatgccggtgacgacaacgcgcttcatcagcacaaacctccattcacggccaggacctggcgcgtgatatagccggcttcggccgacatcaggaagttcaccgcaccagccacctcttccggcgtacccatgcgctgcgccgggatcattttcatcagctcttccaccggcacgttttcatccagcatcgccgtgtcgatcaagccgggagcgacgcagttgacggtgatcttgcgcttgcccagctcgatggccagggccttggccgcgccaatcagaccggctttggacgcgctgtagttgacctggccacggttaccgatcaaaccggaaaccgacgtgatgcacacgatacgcccagccgcgcgacgacgaatcatcggcatcatcaccgggtgcagcacgttgtagaaaccgtctaggttggtgcgcatcaccacgtcccagtcatcttccgacagggccgggaacgcgccgtcacgggtcaggccggcattgagcaccacgccgtaataggcgccgtgttgctccacatcggcctcgagaatttgcttgcacagcgcacgatccgccacgtcgaactgcagcacccgcgccttgcggcccagggcttcaacctcggcccgcaccgcatcggcctcggcgcgaccgctgcggcagtgcagcacgaggtcatggccggcctgggccaggcgcagtgcaatggcgcggccgatgccacggctggagccggtgaccagtacggattcagtcatggcgttacgtccttcgattcatctaaataattggccgcctggggcggtcgaaatacattcaagcgggcgctcgcctggataccgtcagcggtcaggtggcattcgaacacacccatcccattgtcgtcttccagtgaacgcaggccgtggatgctcagctcggcgcctgccggaaagtgctccacgttgcactcgaacttgcgcgtgccaagcaggaagcccagtgccaccgcttcgcctttctggcgcgcgtggcaaccggcgtaggcggcgacgctctgcgccatcaattcgatgccgacccaggccggcaggctgccgtcagcgcggttgaacaggccgcctggcttgaccgtggtgcgagtgtggatctgctcttcgtcgaacgacagcacctggtcgatcaggatcatgtcgcccgcatggggcagcagttcggcgagtggccaatcgatcatggggcctctccaataatcaggctgacattgttaccgccgaaggcaaacgagttgctcatcaggcagcgtttttccagggcctctgtggcttgcgcccagtgcaaggcgggcagtgccgggtcggcctggccgtcccagacatgcggtggcacccggtggtggaccaggctcaaccagcagaacgccgcttccagcgcaccggcagcacccagggtatgcccgctcatgggtttggtcgatgagcaaggcacgccgtgggggaacaggctggcgacggccaggctttccatcgcatcgttatgctgggtggcggtgccgtgcaggttcaggtagccgatctgctcgggctgcaatttcgcgctggtcagggccttgcgcatcgcctgcaacgcacctttgccggtgggttcgggcgcggagatatggtgtgcatcgcaactggcgccgctgcccagcagggcgatgggtgcgggcgccttgctcatcaggaacagcaccgctgcttcgccaatgttgatgccgttgcggttcaccgaaaacggattgcaacgctggttcgacaccgcttccaaggcactgaatccgttgagcgtgagcttgcacaggctgtcgacgccgccgcagatcaccgcgtcgcacatgcccaggtccagcaggcgctgggcgctcatcagtgcgcgggcgctggaggtgcaggcggtggagatcacataggccgggccgctcagttgaagccagtcggcgaggaaattcgccggggcgctgagttcctgctgctggtagtcgtagtcgccagggaactggtgttcgcgcaggtaatgggcaataccgcgactggcttcatcaatacccgaggtgctggtgccgagcacgatgccgacccgcgatgcgccgtagatgcggatcgcctggcggatctcgccctcgatctgcaacgctgcctccagcagcaactggttattgcggctgctctgctggcccaactcggtgggtatggttgccagctcgccgtgcacaccggccaccggcagcacacgttccgggacccagccgctttcggcgcgcatgccggagcagtcaccggcaaacaggcggcggctgacctcggcctggccacggccgagggcgcagatcacgccgagtgcgttgaggtaggcgctcatcgtgccgttcctagcggcgtgatgcggtagctcaagggctggccggtcatgttcacgctgaacacctcggacgactggtacacgatctgccaatggcccggcagcgtacgcgtcaaatccatcgcctgcgcgctggggtacagcgcacgcacgtcatccgccgaggtcagtgcaaacaacagcgcggcgaacagctcgcgtgcctggggattgggcggcagcaagccatcggcctgccactcgccatcgatcaacttttgccgggcctgggggatgcccagcgggtccatcatagaccagcgaatgccgctgccttcgcgctggatcaccagcagccagtcctggctctggccgtcagccaggcgttgcacatgcagttgcagcggcaaggccagggccgggattttcgcgggcaacggcgcctggctggcgcaggcccccagcagcaacaggcaaccgatcaacagccagcgcatcatgacgcggtactcgccaaaggcttgcgtgccacgcagttgaccaacgtttcttcgcgctggcccaccggcggtgccttgcgcagcccccagcgttccagcaggccgaagtcactggcgcggctccaccacaggtatgggtacgaaacgttttgcgggccaaactcaaagccttgttcgcggagcatctccaggtattcttcggcgcttttctgcacatgcatcgggtggcggaacagccagcggatcacccaggtatcgatataggcttcggtggactcggcaaacagcaagtaaccgcccggcttgagcacgcggtagaactccttgagtgcgcgatgctgctcaaccaggtgatggaaggtctggtggcagaacaggatgtccacgctgtcgtccggcacctgcagggtggcgcagtcactgccgatcagctcgatggccaagccttggcgcgccgcttcttcacggctcagttccaggctgtgcgggtccgcatccaggccgatcaggcgcgcaggggcgaatacctgctgcaacagcttgaaggatttgccctggccgcaaccggcgtccagcagcaccggtgcctggggcagcggctcggtgaacaggccgcgcaggtcattgatcgctacgcgcaacacatggtgctgccaggtgtggctgcgcaggaaccagaagccgaaccgggtttcctcgacgtagttcttactcaaatactgactgctcacgcggcatcccctgcacaaatttccgacaacatccgcaagcgtcgcttgggctcactcacaaacgggttgcgctcatcccacgcatagccggcgaggatcgacgcgatcatccggcgaatctccggcgagctgcccggatggaagatcacatcctggaacgtcccggcgtaccagccttcgacgtagcaacggaaggtatcgacaccgcgcttcaacggttcggcaaattcggtctgccagtcgacggtttcgccgttgagctgacgatgcagcacgccggctgccatgctcgccgaacgcatggcgatggtcacacccgaagagaacaccgggtcgaggaattccgctgcgttacccagcaaagcgaagcccggaccgtgcagggctttgacgttggccgcatagccgccgatggtccgcgccggcgtatcccagacggcgttttgcagcacgccggacaggctcggcgtttcatcgataaagccgcgcaggcaggcgtcgaggtcagcatcgcgaccgtcaaaatgcggcttggcggcgaccacgcccaccgagcagcggccgttgctgaacgggatggtccagaaccagatatcacgctgggtcgggtgtgtggtcaccaggatcttggtgcggtcgaagcccgggtgttcgatgcgatcttcgatgtgggtgaacaccgcctggcgcaccggaaagtccgacggcagatccagctccagcaggcgcggcaatacccggccgtagccgctggcatcgagcacaaacttagccttgaggtggtactcgctgccgttctcccggcgtacatgcaggtagcgcgactcgcccttgaagtccacgccgacgatggtttcgccgtagcggatatccacgccttgcttggcggcctgatcggccagcaacttgtcgaactcgccgcgctgcacctggaaggtggtcggtttgccgttgctgaaggtgtcgccgaaatcaaacgcgctgtagcgctcgccccacgcaaatgcggcgccggtcttcacctggaagcccgccgcctgcacggcgtcgagcatgccggcttcttcgatgaagtcgatgcagtgcgacagcaggctttcgccaatcgagaaccgtgggaaatgctggcgctcgatgatcaatacatcatgccctttgcgctttaacagcgcggcggcgatggccccggatggaccggcaccgatcaccaccacctggcgacgttccatttcaactgtgggcacgagggctccttgccacattggcgataatcacattcataaggcgtgcttctgtcgcccggcccagggcgccagcataaagctgaaggccaggcccaggctgactgataagccgaaattgctcaccgctggtgtactggacaccgccagcaggccaaacgacaaccaggtcgtcaacgctgccaacaaggtccccaagagactgaccgcaggaccgccgatttgctcgcgcatcaggatcgcgtagtcgacgctgatggccgtgaccagcagcaggccgaacaggctgaacagcgtcagcggctggcccagccagccgaggctggccaggctgcacagcgccgccagcaacggcagggcgacgatacgcaaggcaccgccgaagccgaacggcaggatcagcagcagcacgatcaatacgcaggacatcaacttcaattccgcggcgctgatctgggtgtcggcaaacactcggttcaagtcgcccaggcggtcgactaactgcacgccgggcagatccagcgcttgcacacgcagcagcgcggggttgttcaagccttgcaggctgaccatcgccgccacgccgccgtccgccggcccgagccacagcgtgcgccaaggttcggccagcgggcctttcagcgcggcgtcgatgtcttgtgtaggcagtgcttgcaactgggtgacttcggcttgcagggcactggcgggtacgccgaggtccagcagtggttgccagtgttgcggcagtgcgttcagcgcatcgcgcacttgttgctgttcggcgggcaggctgaccaactgattgagcgccagatagccctggagcttgtccatgttcaccaactgatcaaggcgttggcccagtgcgcgttgacgctccaacagttgctgctggttatctgcacgcaccaggaagaactggctggtaggctggaaaccggtgatgcgcgccacggcctgggcttcttgcagcaattgtggcggtgcgccgatccactggcggatatcgttcttgctgttcaagtgccacaggccaccgacgcaaaacagcagcaccagcgccagcaatgccgggctcggcacgcgcttgagcaacgactcgcgcaccagccacaggcattgcgcgacgcgcagcggccattgcgccgggcgcagttcgacgcccttgagcagcgctggcagcaggcacacggcggacaggtacgcaccgaccagacccgccgcggagaataccgcaatctgggtcagcgccgggaacggcgtccaggccagcgccaggtagccgatgcaactggtggccaggctcaggctcaagcccggcaaggtgatgcgcagcgccggccagctgcgccaggggctcatgctccagctcttcgacaggtaatgcagcgggtaatccaccgccacgccgatcaggctggagcccagcaccagcgtcatcacatgcatatggccgaacagcgccacacaggccaccgcgccaaacagcatacccaccagcaccggcacaaacgctagcaacacgcgccagcggcggaaggcgagcagcagcaacaacaggatgccgacggtagcgccgccgccgacccaggtgatctcccgcgtggcttgctgctgaccattggcggcgtacaacaaaccgctggcggcgagcaactgcgcgccttgctgaccggcttgcgcgcggctcgcctggagcaggtccgccacttgcagcggcagtttcatgtcgaaggcattgccggtggtgcgtgcccgcagcagcacccagcttttgccgtcggcatcggcgatcagcgcaccgctgccgatatccagctgcaccgaaccgtgttgcggctggctgttctggatacgtccggtcaggcccagccagtcatcctggctcggcaccaggctgaacccggtgaaagggtcgaacagcgcctgtacgcgttgctggacaaacgcatcgggatgctcgatcagttgctcgcggtccttggccgacagcatcgccaggcggccgcgcagcaattgctcacgcagcgccggcaagtcggcttgcaggttccattgcaccttctcaaacagcccgctggcctgccagcgctcgcccaactgttgcgccacggcgacggcttgctggcggtcggcatgccccaccagcaccagcatttcgcggttcagcggttcttgcatgcgttgttcggcttgctgttccagtgcatccggggtgttgcccggcaccagttccatcaggttggccgacagcggcgcgccgtgacgccattgccagccggccagggccagcacggccgccagcaggatcaggaacaggcgcggcagcaggcgctcactgggcaaagtcgtgttgctccgcgtcgctcaagggctgggctgcggtgctgtcctgcatgcgcagcacggtgctgtcgccctgggtttccagcagctcgattttttgcaccaactcgccaccgtcgatattgatctgggtgaagacttgttttaacagcagcgagcgtgggatcaacgtcagcttccagtcgttggcttcgcctttcaattgcagttcgaagtctcgctgcaaaccactgctgtcgccctgcagtacggcgaggaacagccgattttgctcggcaccggcgctcttgttcggcagcagttgccagccattggcatcgcgacgggcaatgccctgggcgctgatgcggtagtcctgttgtagtggggttttcagcagccacagcaggccatggtccttggcgagcacgaaggtgcctttgctgaccaatggctggggcagggcgcgcaggtgtttttcctgggtaaagttgccgtggatcaccgagggtttggccagttggtcgctgagttgctgcaaatcgaaagcgtgggcactgaaactcaggaacaacccgatcaaaaatgtgggagcgggcttgcccgcgatgagcctgagggcgctgcgtagtgtccggcggatcgcgttatcgttgaagtccatcgggggcaagccccctcccacatgggatttcatttcagggccctttcgacggcgtcggtgaagactttgggggaggccaactgcatctcgcggctggcaatctcaactgccacctgcacggtgctggcgcgggtcaaacgctcgccgctggccaaatcggtgatcaggtaattgaccttcaagcggttctcccactccaccaggctggcgcgtacgttgatggtctggccgaacacggcgccgcgcacgtagcgcagttgcaggtcgatcaccggccaggcgtagcccgattcgagcatcgccgtgtagttgtggccgagcttgtccagcaacgcgcaacgcgccacttcaaggtacttcacgtaatgcccgtgccacacgacgttcatggtgtcgacgtcaaaaaacggcacgaggatttcagtgtcgcaatgcaatacgccctggctacgcatgcagcctccaatgttgttcggcgatgcgttgcaggcacaggcgcagttcgccttccagggcgcggtcttcgatgaccggtgggaagtccttggccagctcttcatgcatcgccgccaaggcgggtggcagcggccgtgcatcctcggcctgggcccgcagccacacgccctggtttgcggcgagcagggtggcggcggcgacttgttcggtcagctccagcacgcggatcgcatcgcgggcggcgatggtgcccatgctgaccttgtcctggttgtggcactcggtggagcgcgagaacacgctggcgggcatggtgtttttcagggcttcggcggtccaggcgctggtgccgatctgcaccgccttgaagccgtggttgatcatggcgcgatcagccggcgcgccggacaggttgctcggcaggccgtggttgtaacgcacgtccaccagcagcgcgagctggcggtcgagcaggtcagcgacgttggccaccagggtcttgaggctgtccatggcgaaggcaatgtgcccgccgtagaagtgtccgccgtgcagcacgcgttcttcttcggcgtcgatgatcgggttgtcgttggcgctgttcagctcgatctcgatgaacgagcgcagccagttcaggctgtcggccagcacaccgaggacgtggggtgcgcaacgcagcgagtagcggtcttgcaggcgatgcagcggcgcggtgggcgcatcgatggccaggtccttgcgcagccaggcggcgacttgcatctgccccgggtgcggcttggcggcgaacaggcgctcgtcgaagtgttccgggttgccttgcagcgccaccacgttcaacgcggtgatgcgcgtggccagttgcagcaggtagtcggcgcgggcgaaggccaggcatgccaggccggtcatcacggcggtgccgttcatcagcgccagggcttccttggggcgcagcaccagcgggtcccagcccagttcgcggtgcacgtcggcggcctggcggcgctcgccacggaacatcacttcgcgttcaccggacagggttgcggccacgtaggacagcggcgtcaggtcgccgctggcgccgaccgagccttcttccgggatcagcggcagcacgtcgtgttcgaggaacgcgtgcaggcgctccagcaactctacgcgcacaccggacacgccgtggcacagcgactgcaaacgtgcggccagcaccgctcgggtggcctgggcgtcgagcagcttgcccaggccgcaaccgtggaaggtatacagatgacgcggcagcgcctcgacgtgctgcaagggcacggccaccacgcacgaatcgccgtagccggtggtcacgccgtagatcacgccttccttgtccagcagcgagtcgaggaactgcgcgcccttggcgatgcgctggcgataggcggcgtcatcctgcaactgcgtaggcgcctgacggttggccagggccagcacgtcttcgatgcgcaaagggcgttcgccaaaggttaccggctcaagatgcgtggtcatcggtcttccagaaagggtaaaagttgaaccattgttggggcgcttccaggcagaactggcccaggcgtgcggcgtagcgcgcggtccacagggctatgacctgctcgcgggtggtgcgtttccattcgatcaacggcgtaaacggctcgatgctcaggcgataacggctgccgtgcttgaggcacatcaacaggttcaccgggcatttgagcaggccggccagcagccacgggccttgggggaaggcggcgtcatggccgaggaagtccacacgcaccgtgcgcccgccgtgcagcggtacgcggtcgccggcaatggccagccactcgccatcgtccaggcgctggctgagcagcagcatggtggccgggtccagctcgctgacctggatcaggcgcaagtgcgtagccccggcctcgcccaacaggcggttgaattgttcggcgtgcttggtgtgcaccagcacgttcatggtgacttgctcaccgatctcggccagcgcgcggcacacttcgaggttgcccaggtgcgcgcccaccagcatctgcccgcgctcactgcgcagttgcccgcgcaattgcgccgggtcgttgatttcgatctgctccagacgcagcttgccgttccacacgtcgagcttgtcgagcaaggcgtcggcaaaggccatgaactggccgaagactttccagtggctggggcgcagttcgtcacgcccgctccagtcggccaggcgctgctggtactgccaggcgctctggcgcgcggtccggccgaacaggaagaagtacaggacgatgccgtacagcaccgggctcagcagtcgacgaccaaggaccttggcggcgaaggcggtgagtttcatcagccaatagctgccgcgttcctcgcggtcggcccagtgtttgctgctgtcgctcatgcctgccaccgtcgccacaggatcatcggtgcgcggatcagcatgccgaagaacaaccgggtgtgcatggccgagatgcgtacgttgtcgcggaacaggcggaagtgcgacagtccatcggccgggtaatgcacctgggtcggcagccagcgcatcggctggttgcgccaggccaggcgcaccaggatgtcggagtcgaagtccatgcgcgtgccgatgtaggccgagttcatcagcgccagcaccggtgccagcgggtacacgcgaaagccgcacatcgagtcgcggatctgcaacgacagggtgttgatccacacccacacgtgggtcaggtagcgcgcatacaaacggcccttgggcacgctgtcgtcgtattccgggtagccgcagatgattgcatcggggtgccggcgcgaggtgtcgataaaggtctcgacttcgcgcaggtcgtgctggccgtcggcgtcgacttgcagggcatggctgaaacccaggcgtgcggcttcgcggaagccggccatcactgcgccgcctttgccctggttgttgggcagggtcagcagggtgacgttttccagggtcgccagttgcgccaatacagccgcgcacgccgggctgctgccgtcatccaccagcaggcagggcaggccgctgtccagcaggctgcggaccacggccggtacggcggcttcgtggttgtagaccgggatcagggcgcaggggttatgcattggatgccaccaactgaatgcgtccgctggagcaggccgctacgccgttgcgataggcgaaatacaatttgccgcgttccgggtcaaagcgcaggtgcagttcgatcccgtcgcctgggcgcaccagttgctgaaacttgagcacttccatacccgcaaaactcggtggcaaatcgagcagttgctggcccaggttgaacgcccactcgacctgcaccacgcccggcagcaccggcgtgaccgggaagtggccgctgaagtaggccagatctggcggtacgctcagttgcacggtccattcgccattggcttcgacgcgctccaagacttccggtgccttgggccggggtgccagcaacagtgcctcgatgtcggcctgaggcagtttgccttggctgttcagcggtagctgtctcagtaaccgccaacgacgcggcagcgccagggcttcgcagtgctggctgaggtgttggcgcaaggtttgggtgacggttcggcggccttgattgcgcaacgcatgcaggccttcagcgctcaacaccaccagcgcaccgagtgaagcgcgattttcctggactacgcccagacgggtttcggcgacccacgggtgggccatcagcgcgtgttccagcatgggcagggaaatgcgtttttcttccagcttgacgatgcggtccaggcggccgagcagctcgaaacggccatcggcatggatgcgtgcggcgtcggcggtttgttcgacatgcccctcaggcaggtatggcgatgcaatgcgcagggcgccgtcggcatcttggctcagttgcacgtccgcaaacggctgccaaggctgtgcgccttggcgccaggcgatgccgccggtttccgagctgccgagaatctcggtcggccactgttgcaagcggtcgtacaggctgccggcggcgtccaccggcaatgcgccgccggacgaaaacacccgcgacacctggctcagcgccggccagtcgaggttatcgcccatgcgcttgagcagtgccgggctggcaacccaggcaaagtgcgcgtgctcgcggctggcgcgctgcatgtcttcagggaatgccagttgcctgcgcacaaaggtacggccggcgcacagcggccagagtacgcggaacagcaaaccgtagatgtgttgggtggcgacgctgccgatgatgcaggcgtccttgaggtcctggccccacagggtttccagggcctcgacctcgttggccagttggcgcagggtcttgtcgatgcgcttgggttcgccgctggagccggaggtgcacaggctcaggtggcaagtgtccaagtcaagtgcggcagcgctcagtggcgccgcatacagcgactcaaggtcaaccgcttcggtcagccaggcatcgacggcctcatcccagcgttggcgggtctgaggttgcaggtcggcgggcagcagtacgctgaccccggcccgccaggcacccagcagggcaatcgccagcaggcccgcgtcttcaaggtacacggccaggcgctggataccacgcgcttgcaggcctgcggccaggctcagggagtctgcccacagctgggcgtgattcatggcaggttcggtggtgaccggacgctgttccagcggctcaagcagcacgtgctcaagtttcaacccattcatacgcggcctcgaaccctttgtcgtaccagccattccacggcaaacaacagccccatcagcccgtaggcgatcaggccgttgtacaacgtccaccagctcagcggcgcccacagggtgagggcggcggcgagcaggccattacacagaaaaaatacactccacaccacggtgacctggcgggtatacacgatggcgtggggcggcaacaccgggtcggtcatgcgcgccaggcgctcgaccatcggcgggccatatttgaggctcaggccgaacaacgccaacatgaacccactgaccaggctcgggtaccagcgcagcaagtgcgggttgtcgaaccaggccagcaacaggcagaacacgatcaccgccagcgccatccagcggctgccggggcgtcgtgcaccggtcagcgcgcgcagcagccacaggccacccagcaacaggccgaactgccacggtgcgaagtgttcggtgccgtaatacaccgcgaaggggtacagcagccccgccagcaacaggccaaggccgatcagccggctcatgcggcaggcgtgaccagacggtacaccgcctcaaccacgtcgttcacggtgcgcacagccttgaattcctcggcggcgatcttcttgccggtctggcgcttgatatggtcgatcaagtcgacggcgtcgatgctgtcgatttccaggtcctggtacaggttggcgtcgagggtgacgcgttccggcggcagttcaaacagttccaccaaggcatcgcgcagggtgttgaaaatatcgtcacgagtttgcatggtccggtctcaagctgcctgtctggccgtgacgaacgccgcaaggctggccacgttggtgaagtgattgcgggtgtccttggcatcggcatcgatcttgatgccgtactttttctggatcgccaggcccagttccagggcgtctaccgaatccaggccgaggccttcgccgaacagggtctgctcgctgccgatgtcgtcgacgctgatgtcttccaggcccagggcctcgatgatcagcgcctttatgtcgtgctcaaggcggtgttggtcgctcatcttcggcgagctccttaataaaatagtgatgcaggtaatcgttgagcttgcgtgaggcctggggcgctggccccagtgttgcgaacgcctgtggttctatatcggcacccacccgcaaactgaagtgcacgcggcatttcgggatgcgataccagggttcggccttggtcagcgtggtcgggctgaccttgatcaccacgggggtgatgattgtcgcaccccgcagtgcaatggcggcaccgccgcgatgaaaggcaggcgccgcgccgggtgtggtgcgggtgccctcgggaaagatgatcagggtctggccactgcgcagggcgtctgcggcggcatcgagcatctcggcactgccgtcgttgctgatataaccggcgtcgcgcaccgggccgcgggtgaacgggttctgccacaggctctgcttgaccacgcaattggcctggcgcaccaggccgatcaggaacaccacatcgatcagcgacgggtggttggcgatgatcatctggccagggcggccgagtttttcggcgccttcgacgctgtaggtcagcacgccggcgcgttgcatcaggcggataaagaaccagaacagccaactgatcgtgtggcgggctcggctgcggtgtcttgcagcgctgcctggcaggcaactgagcaacggaaacaccagcaaacgcaggcacagcccgccgaagccgaacagcgcaaagctggcggcggtggcgaacagacgccagtaataggcgtcccgtggtttgtcattcagggcttgcgttgccagttccatacgcggttcttccaggcatgttggcaggcgacctgttcggtgagcagggtgcgcagcaggttcagggcgtggggccactgggtttgagtgtgttggacagtgccgctgttcagttccaactgccactcgtcgcccggcgtcagcagcagaccgagggcgtatgggaagggtacgtcaacgatccagctggcataggcttcgggcggctgctcctcggtaatcaccagtaaaaccgctggcgcgccctcgttgagcagcgcggcggcttcgagcatgccgtgctccaggccatcgccggcggcggcgagggcggtcatttcgctggtttcattgcgcaggatcgaccaaaggccaattaccgcgttgtgcaccgacaggctgaactgggtcggcgacagcggctgctcgctggccaggtcgctgaggatgtcgagggtgcgcggggtctcgccatgccgggaaataaacaccagcggcaggtcctgcaggccttcggccaacggccaacccacgctgaacgccatgcgtgccagcctgctcaggcggcggcgctgcatggccggcaggaacgagacgtcaggggctgcatcacttgcgggcagcaacgccggcgcctgacaccaggcgcgccagtcgtccacgctatcgagcccgggggcccaggcgcgccattgggcgatgttgaaagtgatcactgagaagttatcccgcccctgcgggcttccatgtgcggctgttggccccgaataccgggacagggaacaatagccgaatggcgcgcattatcccggtgccgtggggttctagcaaactttggtaaagatttgtgcacggtcgattacaaaatagtggaaagaatttacagattgtcctttacccaggggctggctggattgtcggaccgttctttttaatctgtgggctgtgtatgacagtcatcgcgccaatggcatggtgatgcagcagtgcatggattaacgaggtagctaacaggcgcttttgccctctacactcggacattcattgatacacggaggtttttccatgcggcgtgtggtgttcaatcaaaaaggcggcgttggcaagtccagcatcgcctgcaacctggcggcagtcagcgccagcgaaggttatcgaaccctgttggtggacctcgatgcgcaagccaactcaacccaatacctcactgggttgaccggcgacgatatacccatgggcattgccgaattcttcaagcaaaccctgtcttccgggccgttttcgaagaaaaaccgggtggatatctacgagacgcccttcgacaacctgcacgtgatcaccgcaaccgcagaactggcggacctgcagcccaagctcgaagccaagcacaagatcaacaagctgcgaaagctgctggatgagctgagcgaagattacgaccggatttacctggatacgcctccagcactgaatttttatgcggtttcggcgctgattgccgctgatcgcgtgttgatccccttcgattgcgacagcttctcgcgccaggcgttgtatggcctgctggctgaaatcgaagagctgaaggaagaccacaacgaagggttggaagtggaaggcatcgtggtcaaccagttccaggcccgggcgagcctgccgcagcagatgctggatgagctgattgcagaaggcttgccggtattgccggtgtacctggccagttccgtgcgcatgcgcgagtcgcaccaggagagcaagccgctgatccacctggacccacggcacaagctgacgcagcagtttgtagagttgcataacctgctggaaaacgcgtaacgaagattcaatgtgggagggggcttgcccccgatgacggagagccggtcgacacctatgtgactgatacaccgctatcgggggcaagccccctcccacattggccggcgacgcttttgaaatttaggttagatgccttggctacgtaaccagctcatcaactgcggcaacgcaaacgccccactctggcgcgccacttcgcggccgttcttgaacagaatcaaactggggatcgagcgaatccccaactgtgccgacaactgctgattggcctcgctgtccagcttggccaaccgacacttgcccgccaactgcccagccgcctgttcgaacaccggtgcaaacgatttacacggcccacaccagtcggcccatacatccaccagcaacggcaggtcgcctttgatctggctggcgtagtcgccttgtttcagctcaaacggcttgttcaacaaaaccggctgcttgcagcgcccgcactttggcgcatcacccaggcgttcaccggggatgcggttgaggccgttgcagtgagggcagggtatgacgaggggttcggacattgagggctcctagaatgtggtcgatggatcctacttggagccagggccggtatttatcaagacagcagcatcattgtggcgagcgggcttgccccgcgttgggctgcgtcgcagcccccaagatggttgcgcgatttcgggtgactaatcagggccgcttcgcgccccaacgcggggcaaggccgctcgccacaatggagggcatcgttcttacgatcttaggaagaacaactaatctccaaatgctttccccaatccggcggccgctgtgcgtattgctccatccccgcttgctcctcaaacggcctggaaagcacttcatgcagccgtcgcacctcgctgtaatccccagattcggcggcaacgatggcgttctgcgccaggtagttgcgcaggatatacagcgggttcaccgcatgcatccgcgctcggcgctgttcttcgctgtattccccatcccgctcaacgcgcgccttgtactgctcggcccaggcatcaaacccggccaggtcgacaaagtcatcgcgcaaccgtgccacggccaacgccgccgactcatcccccaggcggcggaagaacagcgtgtaatccacgccgctgttctgcatcagcttcaacaaccgctcgaccagctgctggtcatcgtcttcggcggtggtcagccccaggcggcggcgcatcaggtccaggtagttcgcctggtacagcggcagatacagccccagtgcttccttcaatgcatcgacgctgataaacggtgtcagcgcctgggccaatgcactcaagttccactgcccgatcggcacctgattgctgaaggaatagcgcccttcgtgatccgagtggttgcaaatgaagtgcgcgtcaaagtcgtccaggaacgcaaacggcccgaagtcgaaggtgatgcccaggatcgacatgttgtcggtgttcatcaccccatggcagaagccgtaagcctgccatttggcgatcagctcggcattgcgctcgacgatttggcggaacatcgccaggtacggctcgggctgttcgcggcactcggggtagtgcaggttcaatacgtgctcggccagttgcgcctgctgctcgggcttcttggtgtagtagaaatactcgaaatgcccgaagcggatatggctgggcgccatgcgcaacaccatcgcgccgcgttcctgtttttcgcgccacaccggggtgtcggaaccgatcacgcacagcgcgcggctgctggggatgcccagcgcgtgcagtgcttcggacgccagaaactcgcggatcgacgagcgcaacaccgcgcggccatcacccatgcgtgagtaaggcgtcatgccggcgcccttgaggtgcaggtcccaatgctcacctgcctggttgtacacctcgcccagcagcaacccacggccatcgcccagttgcggggtgtaaccgccgaactgatgcccggaatagaccatcgcccgcggctctgcctcggcccacagtttgtgcccgccgaacagttcggcgaacaccggtgtttcggcaacggcggggtccaggtcgagcagggccatggcggcctcgctcgccacgaccaggcgcggtacgtcgaggggctcgggcaatacgtgagttgagaacgcatcgcccaggcgtgcgaagcgattgtcgaaggtcagttcgtcgagggctttcaccggccatctccagcagaatgtccgagcattctgctggggatagcgcggttagtcgagtttgctcggcggtggttcctgcacgccgccgtcgttggcgggcttggccggggtgtcgacttccaccagtttgtattcctggccgtggaggttcttgagatagacctccatctggcggaacgagatgttgatgtgctctttcttgaactcgcgattgataaagcggttcacttcgtcgatcaccgggttgcggtcgcccaggtcgcgcacgtgcatgcgcagctcgtggtcgagggtgctttcgccgaagttgaggaagtacacatggggctccgggtccttgagtacccgggggttgtcgcgggcggccttgagcagcagttccttcacgcggtccaggtcggagccgtagtccacaccgagcttgagggtgacgcgggtgatggtgtcggtcagcgaccagttgatcaactggccggtgatgaaggttttgttcgggacaatgatgtccttgcggtcaaagtcggtgatcgtggtggcgcggatgcggatcttgctcaccgtgcccgacaggttgccgatggtgatggtgtcgccgatgcgcaccgggcgttcgaacaggatcatgatgccggagatgaagttggcgaagatctcctgcataccaaagcccaagcccaccgacagcgccgccaccagccattgcaacttgtcccagctcacgccgagggtcgacagggtggagacgaaaccgacgccggcaattacataggacagcagcgtggtggtcgcgtaggcgctgccctgggccaggtccagtttggacagcaccaatacttcgagcaaacccggcaagttgcgcgcgagcgcgaaggtgatgccgatgatgatcagcgcgccgagcaagtcgccgatgctgataggcaccatgctgatattggccccggtgccgctggtgtattcgtacagcgtgacgttatccaggtaggaaaataccgagatcaggtccgaccacacccaatacagcgcggcgataaagccaccgagcaaggccaggcgtatcaggcgcatggactgctcgttgacctgctcgatgtccagggtcggttcttcgatcaccgcttcgccgtcaccggcttccttggcggcctggcgtttggccagggctcgcgcataggccaggcgccgggcggcaacgcccaggccacggacgaaggtggcttcgatcaccagccagaacatcagcaggtacagggtgttgatcagccggtcgctgagcttgagtgcggtgtagtagtagccgaagcacacagcgatgaacaatgcgatgggcaacgcagtgaacagcaggcccacggctttgcggaacagcgaggctttttcatgggtcgggctgtgcaacagcaggcggcccagcagccaggccatcagcgcgtagcaggtcagcaccacgccgatgcccagcacatcgtcagccagcgccgccggttggtgctcggcaatcgccaccacggccaccagtgccagtaccaccagcccgagtttgcgcacccagccttgcaggaattcgacctggggtttctcccagcggaagtgcagttcagccacgccacccggcgccaggatgcgataggcggtgtagaacaccagccaggcctgggcgatctgcagcagggccgaaccgaggttggcgttttgcccacgggcgtcgatttgcagcgcgtagccgcacagcgccaggccgagggacaccggcattgccagcaggatgttgatcaggatggcctggggcgtgtgccactggctgtcgcgcttgaagtggccgatgtccaggtgcaccttgctcaagcgttgatacagatttttacgccgccacagcaacgcgccgatcaacagcagcaacggcaggaacagcaacgggcgctgggtcaggccgtcatacagctcgctgacgctggaggcccagggcagggtggcaacttgcttgctcaggtgcgcgggaacggtttccagccattcggtatccagcggcttgttgctgggaatccagaacatctgctcatccagcgtcgcccgcagggtggtggcggtgctgagcagttgtttctggttcagttgcagggtgatggattcgttgagcagcgcgctcagctcacggctcaggcgctccagcaggtcgctgcgggtgatcgccagttccagcagggtgcggcgcagttgcggggtgacgtcttccggcgcctggttggccagcaggttatccacataggcgctgggcgagctgatcagctcgcgctgttggttgacctcgaactggtacaggcgaatgttggcgatgtcgtccgccaggtcgcggtccacggtgaggcgcggcagggcctgcttttgcttgtagaggatcttcgacagcagcaggctgcccttgagcacgttgatctgctcgtccagggccgagtcgctctgggtcacggtgtccagttgctgcttggtctgcaagttcttctgggtcaggtcgttgaggcggtcggtacttttgagcaggtagtcggacagcttcaggttcgccgcgctttccgtggccagcaggctgctgccaccggccttttgcgcttcgatggactgctgggtcacggtctgctgggactgggccaggcgtttctggttgatcagggtttgcaggtcctggatctcttgttccaggcgcgcggtcttttccatcaccagatcgtgctggctgttgcccaggtcttgcagttggctgttgccggccagttcctggcggcgcagggggatcagcgcattgagcgccgcgagttcagcgttgagctggttacgctggtcggcgctgagggtcttgccgttgtctttgccggccttgagcgtcgaattgatctgcaggatgcgcgtctggctgttgctgatttcggtctgggcgcgctcaggacgggtctgggcggcgatggacaggctgttggcgtccgccagttccttttgcaggtcgccttgctgggtgctgcgctgcaccagcaattgctcaagctgcggcaccggcaggctggcgtagcgctgggcgaccgggatgactttggtggccttgagccgggccagttcgcgctggttgtcggcggtctcgcgcggggcgtcttccagttggcgcttgaggtcgaccaggcgctgctcgtaatcctgcttgttgcccaggtatgtcagggtctgctgcaggatggtctgcaacgccttcatgtcggcgtcgggcagcttgcggtcgggcagcttgtccagggtttgctggatagactcggcgctgggcgggtcggcggcgtggacgacgctgacacacagggtcaggctcagcagggcagtggcgagaagagtgcgcaaggttggcatagagaccggtcgtgcaaggtgaagaatcgggggcgtcgtcgccccgcagtttagaggaagagtccggggcccgggcgacttccttcggggaatctgacgcccactttgccgatcttgttcccgtccatgaccgcgacggtccagatggtgttgttccactccacctggtcgccgacgatgggcgcgcccccgactttctgggtgatgaagctgctcagcggcatgtccgggtcgataccctccagcttcaggccgtacagggccgacactgcgcccaattgggcgtcgccttccagcacgaagtcgccgaagaagcgcaaatccagaccgcgttgcggcgcctggctgaacagtttgcctagggccggcaggttgtgttcgtggccgatcacgcagagtaaatcgccgacttccagcacggtactacccgacggatggagcagttgctggccacggaacagcgcggcaatccgcgtgccttcgggcattttcagctcgcgcagggcggcgccgatgcaccatttttccgcgcccaggcggtagacgaacagctcccactcgctggtgacgtgcacttccagggctgcacgggaaatcggcgccgggtccggcgggacggtgaccttgagcagcttggccacccacggcaggctcgtgccctgcaccagcagcgacaccagcacgataaagaacgccaggttgaagtacagctgcgcatggggcaggccggccatcagcgggaacaccgccagaatgatcggtaccgcgccgcgcaaacccacccaggcgataaaggctttttcgcggccatggaacgccttgaagggcagcaggccgaccatcaccgacagcggccgtgcaaacaggatcatccacagcgccaggcccagggccggcagggcaatcggcaacaagtcatggggcgtgaccagcaggcccagcaccaggaacatgccgatctgcgccagccaggccatgccatcgagcatatgcaaaatgccatgacggctgcgcaccgggcggttgccgatcaccaggccgcacaggtacacggcgaggaagccgctgccgtgcagggcgttggtcacggcaaatacgaacaggccgccggcgatcaccaggatcggatacaggccggtggccagattgatgcggttgaccatttgcagcatcaaccagccgccgcccaggccgacgatgccaccgatgccgaattcgcgcaccaggtgggtcagcaggctccagtgcaggccggtctggccgctggcgagcatgtcgatcagggtgacggtgaggaacaccgccatcgggtcgttgctgccggattcgatttccaggctggcggtgacccgttcgttcaggcctttgccgccgagcagcgagaacaccgctgcggcgtccgtggagccgacaatcgcgccaatcagcaggccttggatgatattgagatcaaacagccaggccgccgccatgccggtgaggccggtggtaatcaacacccccaccgtggccagcgacaacgccggccagagtgccacgcggaaactcgccacccgtgtgcgcaaaccgccatcgagcaggattacggccaaggcgaggttgcccaccaggtaggcggttgggtagttatcgaagatgatgccgccgccatcgacgccggcgaccatgcccacggccaggatgatcaccaggatcgggatccccaggcgggacgaaagagaactcaccagaatgctcgcacttaccagcaacgcgccgatcaggaacaggctgttgatggtcgtcgcattcaaaggcagtactccatgggcaaacaagacggggcgcaaactgaccatgcagtctgcgtgccagcgattctaacctgttgaattgctgcgctgtcaaaaagcttttaaagacaggcgtagatctaaatgtgggagggggcttgcccccgatggcggcctgtcagccaacttatctgtagctgaaccatcgcaatcgggggcaagccccctcctacattatttgaatcaggtgtgtcagttagaggcggaagcggccgaccatgccgttcaagtccaccgccaggcgcgacagctcgctgctcgccgcactggtctggctggcgccagtggctgactgcaccgacaaatcacggatgttcaccaggttgcggtccacttcccgcgccacttgcgcctgctcttccgccgcgctggcgatcaccaggttgcgctcgttgatctccacaatcgcggtattgatggtatccagcgacattccggcgcctttggcgatgttcagcgtcgattcggcgcgttcggtgctgttgcgcatcgaatccaccgcgtgctcggtgccggcctggatactgccgatcatccgctcgatttcgctggtcgactgttgggtgcgatgggccaatgcccgcacttcatcggccactacagcaaaaccgcgaccggcctcaccggcgcgcgccgcttcaatcgccgcgttcagcgccagcaggttggtctggtcagccaggccacggatcacgtcgagcaccttgccgatatcgcgggactcattggccaggtcgccaatcagggtcgcggtggcttgcacgtcaccgctcatgcgttcgatggcgctgacggtttcctgtaccaggtcacggccatcaccggcggaagtggtggcgttgcgcgacgcttcggaggtgctcaccgcattgcgggccacttcttcgacggcgctggtcatctcattcaccgccgtggcggcttgttcgatttcgttgttttgctgggtcaggccacgggcgctttcgtcggtaaccgcgttcaactcttcggcggccgaggccaactgggtggcggagccggcgatgcgttgcagggtgtcacgcagtttgtcctgcatcttggccatggccgccagcaggcgcccggcttcgtcgttgccgtcgaccttgatcgggcgggtcaggttgccttcggccacttcttccgcggcttccaacgcctgggaaatgggtagggtgatgctgcgggtcagcagccaggcgaacaacagggtcagcagggtggcgaccgccaacaggcttaccaccaagttgaaggccatgttgtattggtcctcggcttccttattggtctccagggccatcttgttgttgaggtccagcaggcgcgtgagcacggcgttgacctgttcggagttgctcagcagttcggtgttgagcaggctgcgcaattcttccacctggttggcccgcgacaggctcttcatgcgctcttcaatctggtggtactggccgagcaggcgaacgtattcgtcgtaggtcgagcgttcttcagggctttcgatgagtttttcgtagatgccctgggcggtgcggatctgctggttgcgcagttcgaaggcttccagggtcttttgctgcacgtccggctcgcggttggtcagcaggcggtacgacagcacccgcagccgcagggtcagttgggtgaactcatccagggcgcgaatgctcggcacgctggacagggtgatgtcttcggtggcgccgcggatcttgctcatctggttcagcgcgaacacaccgagaaacaacatcagcgcaccaataaacgcgaagccgaggaaggccctcggagcgatattcatattacgaagcgacatgcgggaatcctgggggagagcgcgatccatgcggccatgaaacggagtgtccctctctatcggtcgtacgactaaagtctaaagggcgctgtgcgtttttgtcgcacctgacgaggggtttgctcgattcaggaaccagatcgggtaaatgcagtcactaaggctcgaaagtgcggcccggcccttaaaaatcgggctgcgcgccggggataaccctggcatccgaggtgaattttctttatcgtcaccgccctttgaaaaagcccgagaaatcaaaatgttagaagcatccctcagccaattggaacaactggtcagtgacctcgtacagcagaatcaggacctgctgggcagcaacgaatccctcaaggccgaactggcccgcgccaaggatgataacgacagcctgcaactgagcctgatggaacaggaagagaagcacggtgccactgccgcgcgtatccaggcgctggttgagcgtgtgagtgcagggcctgtcagcgcatgagtgaagggataaaggtcgtttcgattctcggagaggattactcgatcaaggccccgcctggggaagataaaaccctgatgcacgccgtgaccctgctcaaggcctccctggccaccaccaagaaaaagtacccgaccctgatcggtgacaaattactggtgctggcggctctgaacctgtgcgccgagcagatcgaaatgcagcaggctcaccagcaggaactcgaccgttaccaagagcaagtcagcgccacggtcgatgtgatttccaaggcgatcggaacgccttagaaccactcatcctgcatcccgaggcacgtatcatcgcgtgcctccagaatcgccagttcatgatggcagcccggtacttcccaggtcaggaagtaccgggcggcctggagcttgcctttatagaaggccacatcggccgcgttgcccttggccaagccttcttcggcacgaatggcctgttccagccagcgccagccaatcaccgtatgcccgaacaccttcaagtacagcgccgaattcgccaggctgctgttgaccttgccctgggcgagatccgtcagcaggccgatggtcacgctttgcaggcggtttaccaactgctccaacggttcccttagcgcagtgaggcttgggtattgctgcgcacgggcgccggtttcggcgatcagccggatgagttgcttcaagcccgcgccgccattctgtgccagcttgcgtccgagcaaatccagggactgaatgccatgggtgccttcatggatcgggttcaggcggttatcgcggtagtactgctccaccgggtattcacgggtgtagccgtggccgccgagaatctggatcgccagttcgttggccttgaggcagaactccgacggccaggatttgacgatgggggtcagcaggtccagcagttcgtgggcctgtttgcgcgcgtcttcggtttccagggtggtggtgtcgtcgaacaggcgtgcggcgtagaggcccaggtcgaaggcgccttccacgtaggacttttgcgtcagcagcatgcgcttgatgtcggcgtgctggatgatcgagaccggtgcagtcgtgggatccttgctgtccggcaggcgaccttgagggcgctcgcgggcgtactccagggaatagaggtaaccggcgtaaccgagcatcaccgcccccatgccgacgccaatacgcgcctcgttcatcatctggaacatgcaactcaatccctggtgcggtttgcccaccagatagccgacacagttgccgttatcgccgaaattcaacgccgtggaggtggtaccgcgccagcccatcttgtggaacagcccggcaagcaacacatcgttgcgctcgcccaggctgccatcgtcgttgaccaggaacttgggcacgataaacagcgaaatgcccttcactcccgcgggcgcgtccggcagcttggccagcaccatgtgcacgatgttttctgacagcgggtggtcgccgccggagatgaagattttgttgcccttgagtcgataggtaccgtcagccgctggctctgcgcgggtacgaatatccgacagcgatgagccggcgtggggttcggtgagtgccatggtgccgaagaaacggccatcgatcatcggttgcaaaaagcgttgcttctgatcgtcggtgccaaagctttcgatcaggttggcggcacccatggtcaggaacgggtaggaggtggacgccgcgttcgccgattggaagtgcgcgaaacaggcttgtgaaagcagtgtgggcagttgcatgccaccggcgtcgaaactgcgtgcggcgttgaggaagcccgcttcgaggaacgcatccaccgccggtttgacctccggaatcaggatggccttgccgtcttcgtagcgcggttcgttctcgtcgttcttgcggttgtggggggcgaagtatttttccgcaatgctgcgggcggtgctgatggccgcatcgaaggtttcgcgattgtgctcggcaaaccgctcgcgctgggtcaggccctcggcatcgaggacttcatacagctcgaaagccagattacgggaactgagtagcgtctcggacatggcggattacctatggaggagtttgcctgagtctaagtgcgcgaatagaggctggatagcaagattgatttgggtgatgcacaggcaaatgtgggagggggcttgcccccggtggcgatgtgtcagtcaccaagtgcattggccgatccaccgctatcgggagcaagccccctcccacattttttaccgcatttcgtcaggcagttagccgatggtcatcaggctggcgttaccgcccgccgcagcagtgttaacactcaacgcccgttcgatcaccaaccgctccagcgcaatcgccgtctcgccctgggacaaaccatgcaccccgacaatcgcgccaccacgctgcgccacttgctggcacaccgcacgcaactggtcggaatcgccgtggtgcagaactgcgtcgaataccacttcgtccttggtccagtcagccacgcgcttgatcttcgcctgaatctccttcggcaggcgtgggaacaaggccttggtctggtcggtttccggccataccgccgaaccacctacggccagcactgccgccagttgcgtcaacagatcagcttccacgtccgccaggcacagtacgtgctcgcggggcaggatggcgtagctgttgcgctcgccggtcgggccggccagttggcgggtgataccgctttgcgattgcgcggcgaactggcggcacaaggcgctcaggtcgctggactgattgctgtcggcccaggttttgagggcggtcagcggttggctcatggcatcgcgcaaacgaacatccggtgcggccagtgcgtcgccgcgtacgaaggattgctcgatggcatccgtaggacgggtcgacagcaggcggtacaggtacagcgggccgccggctttcgggccagtgcccgacaggccttcgccgccgaacggttgcacgccaaccacggcgccgacgatgttgcggttcacatagacgttaccggcatggacgttgtcgatcaccttggcgatggtctcgtcgatgcgggtgtgcacgcccagggtcaggccatagccggaagcgttgatctggccgatgagctggtcgatctctttgcgcttgtagcgcaccacgtgcagcaccggaccaaagatctcgcgttgcagttcgtcgaagctttccagctcgatcagggttggcatcacgaaggtgccgcgcttgatctcttcaccatcggcaatcgccacctggtacacattgcggcctttgtcgcgcatggcctggatgtgtttctcgatgccggccttggcttcggcgtcgatcaccgggccgatatccaccgacagacgctccgggttgcccaggcggcattccgccatggcccccttgagcatttcgatcacgcggtctgccgaatcttcctgcaggcacagtacacgcagggccgagcaacgctggccggcgctgtcgaaggccgacgaaaccacgtcgatcacgacttgttcggtcagtgccgaggagtcgacgatcatcgcgttctggccgccggtttcggcgatcagcgggatcggacggccctgggcatccaggcgtccggcgacgttgcgttgcagcaggcgcgccacttcggtggagccggtgaacatcacgcctttgacgcgatcatcacccaccaggcgggcaccgacggtttcaccctggcctggcagcagttgcagcacgccttgcggaatgccggcttccagcaagatgcgcacagcttgtgcagcgaccagcggggtttgctcggcgggcttggccagcaccgggttaccagcggcgagcgcggcggcgacctgaccgctgaaaatcgccaacgggaagttccacgggctgatgcagaccaccgggcccagtggacggtgggcgtcattggtgaagtcgttgcgtgcctgcaccgcgtagtagcgcaggaagtccacggcttcacgcacttcggcgatggcgttggcgaaggtcttgcctgcctcgcgggccagcaggcccatcagtggctggatctcgccttccatcaggtcggcggcgcgctccaggatggcggcgcgctcggcgggcggggtggcctgccagatcggaccggcactgatggcgcattggatcgcgttgtcgacgtcttcgacagtggcttcttgcacatgaccgactacatcgcgcaggtcggacgggttgagcaccggcgccgcggcttgctcgctggaggtgcaaccgagcatcggtgcggctttccagttgttgtgagcggtggccagcagcgcgcaggacagcgatgccaggcgatgttcgttggccaggtcgataccggccgagttggcgcggtcgctgccgtacaggtcgcgcggcaatggaatacgcgggtgcggcaggccgaagccgccttccagcgtggccatttgctcgatgctggccactggatcggccaccagctcctggatcgagatggattggtcggcgatgcggttgacgaacgaggtgttcgcgccgttttccagcaggcgacggaccaggtaggccagcagcgtttcatgggtgccgaccggtgcatacacacggcacgggcggttcagcttgccatcggcaaccttgcccaccacctgctcgtacagcggttcacccatgccgtgcaggcactggaactcgtactggccggggtaatagttctgaccggcgatatggtagatggccgacagtgtgtgggcgttgtgcgtggcgaactgcgggtagatgacttccggcaccgacagcagtttgcgtgcgcaggcaatgtaggaaacgtcggtgtacaccttgcgggtgtacaccgggtagccttccaggccttcgacctgggcgcgcttgatttcgctgtcccagtacgcgccttttaccaggcggatcatcaggcggtggcggctgcggcgcgccaggtcgatgacgtagtcgatcacatacgggcaacgcttctggtaggcctggatcacgaaaccgatgccgttccagccggtcagttgtggctcgaagcacaggcgctcgagcaggtccagggacagctccaggcggtcggcttcttcggcgtcgatgttcaaaccgatgtcgtattgcttggccagcagggtcagggacagcaggcgcgggtacagctcgtccatcacgcgctcatactgcgcacggctgtagcgcgggtgcagcgccgacagcttgatggaaatgcccgggccttcataaatcccacggccgtgggaggctttgccgatggagtgaatggcttgttcgtacgaggccaggtacttctgcgcatcgtgttcagtcagcgcggcttcaccgagcatgtcgtaggaatagcggaagcccttggcttcgaacttgctcgcgttggccagggcctcggcgatggtttcaccggtgacgaactgctcgcccatcaggcgcatggccatgtcgacgcccttgcggatcatcggctcgccgctcttgccgatgatgcggctcagggacgaggtgaggccggcttcgttgtgggtggcgaccagtttgccggtcagcagcaggccccaggtggcggcgttgacgaacagcgacgggctgttgcccaagtgcggctgccagttgccggtgctgatcttgtcgcggatcagtgcgtcgcgggtgcctttgtccgggatgcgcagcagcgcttcggccaggcacatcagcgccacgccttcctgggacgacagggaaaactcttgcagcaggccctgaacaatcccggcacggccaccggcactcttctggttacgcagtttttcggcaatcgaggcagccagcttgttggtggcttcggccatcggcgccggcaggcgggcctgttcgatcagcatcggcaccacttccggctcggggcgacggtaagcagcagtgatcgacgcgcgcagcacggattgcggcaggatgctttcggcgaattcaaggaagcactggtgggcgtggtcggtctggacctcgccagcgtcgtcagcgtccttgctgctcaaaccattgagttcggtcagggttgcaccaccctccagcttctccaggtaattgaaaattgcctgcttgatcagccagtgcggcgtgcgatcaatggaggtcgcggcggccttgaggcgctcgcgggttgggtcgtcaagtttgaccccaagggtggtcgtagccattttcttatcctcatgggtgccactaccgagtggcatcagctggcggcaagattagctttgcgcatgcagaggtgcaaccgggtgcaacccattttcttcatgatttttttgatcgtggtcgggaaaaaattcggccttcgacggaatccgcttcgccttggtgcgtttgcttctgagatcggctgttcttgctccgaaaaggagcaaaaaccgggtgttttgcgcatttcacatcaaggtgcaacttattctcgcgaaactggttgcaccttatttgctttgttgaatagcattcgcgcccaaggtgcaaccacctctgaggttcggttcatcggctggcggctttcctggggaaacgtcagtcataaatgcgcggcacgcagctacgtctacctacttccagtgggtggtcgtctgacagaccgccgctacataaaaacaaagccagggcgtcactcttatgagcgttagtaatccaaccctgatcacgttcgtgatctacatcgcagcaatggtgctgatcggcttcatggcctatcgctccaccaacaacctttccgattacatcctgggcggtcgcagcctcggtagcgtggtgactgccttgtcggctggcgcttccgacatgagcggctggttgctgatgggcctgccgggcgcgatctacatgtccggcctgtcggaaagctggatcgccatcggcctgatcgtcggcgcctacctcaactggctgttcgtcgccggtcgcctgcgggtccagaccgagcacaacggtgacgccctgaccctgccggattacttctccagccgtttcgaagataaaagcggcctgctgcggatcatctccgccgtggtgatcctggtgttcttcaccatttactgcgcttccggcatcgtcgccggcgcccgtctgttcgaaagcaccttcggcatgtcctacgagaccgccctgtgggccggtgctgcggcgaccattgcctacaccttcgtcggtggtttcctggccgtgagctggaccgacaccgtacaagccaccctgatgattttcgcgctgatcctcacgccgatcatcgtgctgctggccaccggtggcgtcgacactaccttcctggcgatcgaagccaagaaccctgacaacttcaacatgctgaagaacaccagcttcatcggcatcatctcgctgatgggctggggcctgggttacttcggccagccgcatatcctggcgcgtttcatggcggcggactcggtgaagtcgattgccaaggcgcgtcgtatctccatgacctggatgatcctgtgcctgggcggcaccgtggcggtgggtttcttcggtatcgcctacttctcggcacacccggaagtggccggtcccgtgaccgaaaaccacgaacgtgtattcatcgagctggccaagctgctgttcaacccatggattgccggtgtgctgctgtcggctatcctggccgccgtgatgagtaccctgagctgccagttgctggtgtgctccagcgccctgaccgaagacttctacaaaaccttcctgcgcaagaccgcctcccaggttgagctggtgtgggtcggtcgtgccatggtgttgctggtggcactggtcgctatcggcctggccgccaacccgaacaaccgcgtactgggcctggtgagctacgcctgggccggtttcggcgctgcgttcggtcctgtggtgctgatctcggtgatctggaaaggcatgacccgtaacggcgcactggccggtatcctggttggcgcgatcaccgtgatcgtgtggaaacacttcgagctgttgggcctgtacgaaatcatcccaggcttcatcttcgccagcctcgcgatctacttcgtgagcaagctgggcgcaccgactgccggtatggtcgagcgctttgatgcggcggaaaaagactacaacctcaacaagtaattcgccgggcgttaagcgcctgatgagttgaaagaaaggcccgcttcctacggatagcgggcctttttttgcgtgtgctttacgcagacccagagaggattcgtacgcgttcttgtagggttttactgatttgtccggcgcgtgttcggatgacggcagccgtgatgcagaatcggccaccttacccctcgcagagaaacaccggatgttcgctcctgccaatcaaagtgcctttaccctgtccctcgatggggcgcccagtgaattcaaggtccatggattcatggggagtgagttcatcagcctgccttttcgctttgacctggagttggtcagcgagcaacccgacctcgaccttgagagcttgatgcaccgtcaggcgttcctggggtttgacgcgaatggtcatggcattcatggcctggtgtaccgggtggcccaaggcgattcgggcaggcgccttacgcgctatcagatcaccctggtgccgcagctggcttatttggagcacagcactcatcagcggatcttccagaaaaaaacagtgccccagatcattgcgcaggtattggaagcccaggccatcaaggctgatgccttcgcgtttcatctgagcggcaagtatcccgagtgtgagtattgtgttcagtttggcgaaaccgacctggaattcattcagcgcttgtgtgccgaatggggcattcattatcacttccagcacagccccgagcgccaccggttggtgtttggcgacgatcagagcgtgtttgcgcggccggagcacaccacgccgtattcacccggctccgggatggttgccgatgggcctgcgatcaagcgctttatgctgcggctgaagacccgcaccagtgatgtgaacctgcgggactacgacttcaaaaagcccaacctgacgttggaaagcgcagtctccagccagcagcaacccacgctgaacgaccagcgttacccagggcacttcgtggatcgtgagcgtggcaagtacctggcgcaacgcgtgttggaacgtcatcgcagcgattaccgccaggccagcggccatagcgaccaaccggcgttggtcaccggacagttcctgaagatggctgggcaccctcgtcaggagtggaatgacttatggctggtcacccagttgcaacatgttgggcggcaacctcaggtgtttgaggaatctacccctgaagggtatggcgatgaatcctctcaaggctaccgcaatgaatttgtcgtaacgccttgggacgtgctgtttcgaacaccgctcatgatggcgcggccgcccatgtcgggttaccagaacgcagtggtgacgggccccgccgacagtgaaatccattgcgacgaatacggccggatcaaggtgcaattcgcctgggaccgcgccggtgaacgcaacgatcagtccagttgctggctgagggttgccagcggttgggcccatgatcgttatggttcggtactgatcccgcgggtcggcatggaagtcctggtgggcttcgtcaatggcgacccggatatgccgctggtgatgggttgcctgcccaatgcggcaacacaggtgcccctcgatttgccagcggacaaaacccgcagcatcttgcgcagccagagcagccccgggggtggtggctataacgagctgcgcatcgaggatcgcaagggcgccgaggaaatctacctgcgcgcccagcgggactggacgcagcatgtgctgcatgaccatcgggtgacggtggacggcgaatcgcaccatgaagtacagggcgaagagcagcggataaaccatggcagccgcctgaccgagctcaagcaggacgaccatctggtggtgggcggttcgcagcaggtgcgggccgggcagaccatccagataagcgcaggacaaagcatcgtcatcgatgcgggcgcgaccgtcacgattcaggcgggtgggcagtcgatcaccctgtctgccggcggcattttcagcagcgtaccgatccagcctggcggtgggcccgctgctgtagccgcgccgttgatgccgggagtgaaggcaaaactgttggcagtgatccccgctccgctttctcgcgtgcaggttgccagcctgaaacgcagcgcaccgttttgccaagagtgcgagcgttgcaggagcggccagtgcgacctcacctgacttccatctagaaggactctaagtcgatgcttcaacccttgcttgctggtgaaaagatcttcgcagtactcggcgctgccagcgacgccgagcccttgaatgcgtggcgaacgctggccagcggagcgcctttgcatcccgtttgggccggtacggcctatgcgacctgggaggaggtgatgccctatgtgggcgtcgtcgatccagggagcgcgttcttggaatgggccgccgccactgacgctacggattggggttggctggccgtatcgtccagctcgttggacgtggtggtcgcacacttgcaaagcctgaccaaggtgtacctggccgatgggcaggaggtgttcttgcgcttttgggatggggcgcagtttctgccgatccttcaacagcagggtgaagaaatattgccggtattccagcgctacctgatcaatggccaaccactgtcgggggcatctggcccagtcactgccgccaaagccagcccatggtggcgggtgccggcacctttgctggagcacttggcggagcaatcgccgcaaaccctgatcggtaacctgttgcaatggctcgaagagcagcgccccgacctctacacagcttttgcgccgacgaccttgcagcacaaggtcgcctactttgcgcgtcggtcggatatcagccatgaagcgctggctgactacctggcctcagagctgagttgagcccagcgcctgctgcaaatcttcgagcaggtcttcaatggcctcgatgcccaccgacaggcgaatcatctccggcttcacaccggccttggcttgttccagttcgttcatctgccgatgggtggtggaggcggggtggcaggccagggatttggcatcgccgatgttcaccaggcgcttgaagatgtgcagtgcgtcatagaagcgcacgccggcctcatagccgcctttcaagccaaaggacaggatcgctgagggtttgccttgcaggtacttctgcgccaattcgtggtgcgggtggcccggcaggcctgcgtaactgacccactctacctcggcatggccttgcaggaactgcgcgactttcaaggcgttttcagtgtggcgttccatgcgcagggccagggtttccaggccttgcagcagcaggaaggcgttcatcggggccaatgccgcgccggtgttgcgcagtggcacggtgcgggcgcgggcgatgaaggcggcggggccgaatttttcggtgtagaccacgccgtgataggcgggctcggggttgttgagcccggggaatttctgcgggtagtcggtccaggggaagttgccgctgtcgacgatcacgccgcccagggagttgccgtggccgccgatgtacttggtcaccgagtgcaccacgatatcggcgccgaacatgatgggtttgcacaggattggcgtggccacggtgttgtccaccaccagcggtacgccgcgcgcgtgggcgaccttggccagggcctgcaggtcgacgatgttgcccgccgggttgccgatgctttcgcagtacaccagcttggtgtcgtcgtcgatcagctcggcgatggcttcggcggagtcatcccgggcaaagcgtacatcgacgccgaaactgggcagcaagtgtgcaaacaaggtgtaggtgccgccgtaaagctgcggggtggtgacgatattgtctccggcgcgggtgagcgtctggatcgcatagtggatcgccgcgctgccggcggacaccgccaggcctgcgataccgccttcgagcgcggcgatgcgctgctccagcacgtcattggtggggttcatgatccgcgtgtagatattgccgggcacgtccaggttgaacaggtcggcaccgtgctgggcgttgtcgaattcgaaggcgacattctggtagatcggcacggccacggctttggtagtcgggtctgaggtgaagccgtggtgcagtgcgatagtggcgtctttcatgatggtgatggacctccctggagtgtggatcgccacaataagtccgagtcatggctgatatttagacttttttcaggtggatacctgtcttttcgatataagcaccgcccggcacgttgctctgcaccaacgctcgcgtaaaaggtaaacttcgccccctgcgcaggagcaaccatgaattatcgtcacgcctttcacgccggcaaccatgccgatgtcttcaaacacctgaccttgacccgcctcatcgccctgatgtcgcgcaaggagcagccgttcgcctacctcgacacccatgccgggatcggtctgtacgacctgcagggcgaccaggccaaccgcaccggtgagtacctggaaggcatcgctcgcctgtggggcgaaagcgacctgccaccgttgaccgccgattacatgcgcgtgctgcatgagatgaacccggatggcgagttgcgctactaccccggttcgccggaactggcgcggcgcctgacgcgccctcaggaccgcgtgctgctcaatgagaagcacccggaagacggtgtgttgctcaaggacaacatgaagggtgaccgccgcgtcaaagtgcacctgggcgagggttggcacgtaccgcgtgcgctgctgccggtgccggaaaaacgcgcgctgatgctgatcgacccgccgttcgaaaagctcgacgagatgcaacgctgcgccgcctccctcaaggaagccgtgggccgcatgcgccagaccgtcgcggcgatctggtacccggtgaaggaccagcgcctgttgcgccgcttctaccaggacctggctggcaccggtgcgccgaagttgctgcgggtggagttgctggtgcatccgcttgacacccccaacaccctgaccggctcgggcctggccatcgccaacccgccatgggggctggaagaggaactgcgtgagctgctgccgtggctgtccaagaagcttgggcagacccagggtgggtggcagatggattggctgatcgctgaataaccggatctacaggcatatataaaaacaatgtgggagggggcttgcccccgatagcgatctgtcagttacagatgtactgactgacacactgccatcgggggcaagccccctcccacattttgacccgtgtcggcttcagatcgggcaggtcacgccggtgccgccgatcccgcaatagccctgcggattcttcgccaggtactgctggtgatacgcctcggcgaagtacaccgtcggtgcttcttcgatttccgtggtgatcgcacccaaccccgccttggtcagttctccctgatacgcctcggcgctggcctgcgccgccgccagttgttccggggtggtcgcatagatcaccgaacggtactggctgccgatgtcattgccctggcgcatgccctgggtcgggttgtgcagttcccagaacattttcaacaaatcttcgtatttcactttggcctggtcatacaccaccagcaccacttcgctgtggccggtcaggcccgagcagacttcttcataggtcgggttgggcgtgtagccgccggcgtagccgaccacggtgctgaccacgccatcgcgctgccagaaccggcgttcggcaccccagaagcaacccaggccgaagattgcaaagccgacatcatcgaggaacgggcccagcagcgggttgccattgacgaagtgcgtctccggcaatgccatcggggtttcacggccaggcagagcttgttcttgagtaggcagcacgtttttgttcaccagaatttccgagcgcaagaccatgatcagtcctctcgtcaggttgagttagcaataaagattgagaccgccagtgtgcccgagtgttacagcgctgtcaggcgattggcccgcgcgggtagcgtttgagcatcgccagcagctcggcgccggggatcggccggtcgaacaggtagccttggcccacatcgcaacggtgccggcgcaggaacgccagttgctcggcggtctcgatgccctcggccaccaccttgagcttgaggttgtgggccatggcgatcactgcggaggtgatttccatgtcgtcctggttgtccgggatttcgtggatgaagctgcggtcgatcttgatgatatcgatggggaattttttcaggtaactcaacgacgagtagccggtgccgaagtcgtccatggccagggtcaggccgaagctcttcaattgatctagctgcaggcgcgtgtcttcggtggcttccagcagcaggccttcggtcagctccagctccagcaggttggccggcagttgttcttccttgaggatcgtggcaatcgaggccaccaggtccgggtcggaaaactgcttgggcgacaggttgatcgccacctgcaagttacccatgccagcggcggtcaactgtcggctcatgcggcaggcctggcgtgcgatccatttgccgatggggatgatcaggccggtttcttcagccacgctgatgaattggtcggggcggatcatgcccttttccggatggttccagcgcaatagcgcttccatgccgagcagacggccactgcgcaggcacagcttgggctggtagaacacgtccagttcgttctgggtgagggcgcggcgcaggttgttctccacgaacagcttgtagctggcctcggcattcagtgcttcggtaaagatctgcacctggtgtttgccattggccttggccttgtgcagggccaggccggcgttgcgcatcagggtctgcgggtcgcggccatgcagtggcgcgcaggccagaccgacggagccggtgacactgatcaattggttatcgacgaacatcggcttgtcgagggtcgccagcaattggctggccaccagttggccgctttccaggtcagtgtcgtcgagcaacaccgcaaactcgttactggcaaagcgcgccaggctgccgccggtgctcaggctgttgcgtaggcggcgagccaggctgatcagcagcttgtcgccggtctggtggccgaggctgtcgttgatgcgcttgaagttgtcgatgtccaccagcagtaggctgatcgggctgtcgctgtcacgggcaaagcgttcatcgaggttgcggatgaacgccggacggttgcccaggttggtcaggttgtcggtgtaggccaggcgctcgatgcgctgctgggccagcttggtctgggtgatgtcttcgtagatgccgatgtagtgcgtcaactcgcggttgtcgccgtacaccttggaaatcgacaactggccccaatagggctccaggttcttgcgccggcttttgaattcaccctgccagctgttgctcttggccaggctcgagggtgcgtcgaagagcaattcgctgaggttctccagcgctggcaattgggccaggcggtggccgtggacctcttcggcgctgtactgggtgatcgcggtaaagcttgggttgacgtactccaccacgccgtcgcagttgaccagcagaaaggcattggcgctttgttccacggcacgctggaacaggtgcagggcgctggtggcggtgcggcggttgtggttgttgatcacctgggcgaactggtcggccagttcgccggcaaaggcaatttcatcggcttgccaggcgcgggtgctgccgctttgctccaggcacagcacgcccaccacatgaccatcgacacggatgctggcgtcgagcatggcgtggatgtctttgtcgcgcaggctgtcggccatttcccgggtgcgtgggtcgcgcagtgcgttggtggcgtcaatggcccggctggagtgcaaggcttccaggtagtccgggaaacagctggcgtcgatgggctcgggcaagtggtgctgcccgtccgcgcggtgataggcggagatcggcaccaggcgctggccttcgaggttccagatgctggcgcagtcgatctggtagatatcgcaggcgctgcgggtgatcagctcggcggcttcctgcaacgaattgtgggtggtgtagcgctggcgggccagcaacagaatcagttcctgctgggcgcgcacccgctccagatgctgcagctgttcctgctgggcgcgttggttgagttccagggcgatctgcaggcggctgttctggttttccaggtctgccgtgggcacggcagtagggatttcactgaacaggccgtcaaccaccatcaggtagccgcgcagcaagtggcgattgtgttgtttataggcctcacccatttccagcagactcagcgggccgtcgctggtgtgcagggtatagcgcaccaggtaatgcgggctctgggtcagttgctgctggatggtgtcgtgcagttgatagcgcgcctggggctccatcaggctggcgtatggggtgccgatcagcgcgcacagctcgacagccggcaggccgaattggcgctcgcagttagggtcgaggtaaaggagggcccagcttgcctcattcagccgctcgaaacgcagcataccgaggcgcgaaggcaccggtaactgcgtcactacctcggccgccatacgggcgacatcgggctggcttttcatgggggaaactcacttgaaattacgcgcacggcgccgggctcgcgccctcttttctgttgcctgcggcaaggttgcatcatgcggcgcgggctgacaagagaggatgaaggctaagtgctataagggggttatcggctgtagaagggatttctgcaatcgaggtgatggaaggtgtacaaacctgttttgcgcgtccagcttcttgcctgaaaaccggcaaaaaaagccccgccaagtggcggggttgaggtacgagcgtggcgctcgaaaatcgatgcagccaggcctcctcggtgaagaggaggccgtggcggcttacagcaggatagtgcggatatcgttcagcacttggcccaggcgctgggtgaagcgcgcagcggcggcgccgttgatcacacggtgatcgtaggacagcgacagcggcagcatcagcttcggctggaacgctttaccgtcccaaaccggctggatagtcgccttggacacacccaggatcgccacttccggcgcgttgacgattggcgtgaagccagtgccgccaatgtgcccgaggctggagatggtgaagcatgcaccctgcatgtcgtccggggtgagcttcttgtcgcgggccttggcagccagtgcggcggcttcggcagcgagctgcagcaggctcttctggtcgacgttcttgatgaccggtaccagcaggccatccggggtgtcgaccgcaaagccgatgtgcacgtacttcttgcgaatgatcgccttgccgcttggcgccagcgaactgttgaagtccggcagctccttgagcaagtaggcacaggccttgagcagcagcggcagcacggtcagtttcacgccggctttctcggccacggctttctgcgcaacgcggaaagcttccaggtcggtgatgtcggcctggtcgaactgtgtcacgtgcgggatgttcagccagctggcgtgaaggccggccgcgccgatttgcatcaggcgggtcatcggcacttcttcgacttcgccgaagcggctgaagtcgacggtgcggatcggcggaatgcccgaaccaccggtagcgccgccagcagctggcgcttccttggctttctgcatcatggccttgacgtagacctgcacgtcttccttcagcacgcggccgtgcgggccggtggccgacacagcattcagctcaacgccgaactcacgggccagctgacgcacggcagggccggcgtgaaccttggcaccgcttggcgcaggtgcggcagcagcaggggctggagcagcctcggcttttgcagcaggtgcaggtgcagcagccggagccgcttcagccttggcggccggagcagcagccggtgctggcgtggcggccggcgcagcgccttgtactttcagcttgaggatgaagtcaccggtgccgacttcgtcttccagcttgaccgcgatgctttccaccacgccggcagccggcgaagggatttccatggaggccttgtcggactccagggtgatcagcgactggtcggcttcgacggtgtcgccgaccttgaccagcagctcgatgatcttggccttgcccgacgagccgatgtccgggacatgaatgtcctggacgctggcggcggcaggtgcagctgccggggccggagcggcctcggcagcaggtttttcagcagcaggcgctggtgcagcagcggcagcaggagccgccgcaggggccgcatcagcggcaccttcgatttccagctccagcagttcgtcgccttctttcaggcggtcgcccagcttcactttcaggctcttgaccacgccggccttgggagcagggatttccatgctcgccttgtccgactccagggtcaggatgctctggtcggcttcgacggtgtcgccgaccttcacaaacagctcgattacttcaccttcaccgctgccgatgtcaggtacgcgaatgagttcgctcacaaaaaatctcctcagcagtccagtgggttgcgtttttccgggttgatcccgaacttgacgatagcgtcagccaccaccttcggttcgatctcaccacggtcagccaaggcttccagggctgccaacaccacgaagtgacggtcaacttcgaagaagtgtcgcagcttcttgcggctgtcactgcggccgaaaccgtcggtgcccaggactttgaattccttggacgggacccactggcgaatttgttcagcaaacagtttcatgtagtcggtcgaagcgatcaccgggcctttacggccggtcaggcactcttcaacgaaggtgcgctgtggcttctggccagggtgcaggcggttgtgacgctctacagccaggccatcgcgacgcagttcgttgaagctggtcacgctccacacatcggcgccgacgttgaactcgtcacgcaggatcttagccgcttcacgcacttcgcgcaggatggtgccggagcccatcagctggacgtggtgcgccgcttccttggtgtcttcttcgagcaggtacatgcccttgatgatgccttcctcgacaccggccggcatggctggctgctggtaggactcgttcatcacggtgatgtagtagaaaacgtcctgctgctcttcggtcatcttcttcatgccgtcctggatgatcaccgccagctcgtagccgtaggttggatcaaaggtgcggcagttcgggatggtggcagccaggatatggctgtgaccgtcttcgtgttgcaggccttcgccgttcagcgtggtacggccggcggtgccgccgatcaggaagccacgggtacggctgtcgcctgctgcccaagccaggtcgccgatacgctggaagccgaacatcgagtagaagatgtagaacggcagcatcggctggttgtggctggagtacgaagtaccggcagcgatgaaggagctcatggcgcccgcttcgttgatgccttcttcgaggatctggcccttcttgtcttccttgtagaacatcacctggtctttatcgactggctcgtagagctggccgacggaggagtagatgcccaactgacggaacatgccttccataccgaaggtacgggcttcgtccgggatgatcgggacgatgcgcgggccgatttccttgtccttgaccagctgcgccaggatccgcacgaaagccatggtggtggagatttcacggtcgcccgaaccgtcaaggatggccttgagggtgctgaggtccggcgtcggtacgctgaagctctgcgcacggcgttgtggcacgaaaccacccagcgcggcgcggcgttcggccaggtaacgggcttcggcgctgtttggctccggcttgaagaacggcaggttttccagctcttcgtccttgaccgggatgtcgaagcggtcacggaacaacttcaggctgtcgacatcgactttcttggtgttgtgcgcagtgttcttcgcttcgccggcaccggtgccataacccttgatggtcttggccaggatgacggtcggttgttccttgtggttcaccgcttcgtggtacgccgcgtagaccttgtacgggtcgtggccgccacggttgagtttccagatctcgtcgtcggacaggtcggcaaccatcgccttgagttcaggcgtgttgaagaagtgttcgcggacgaacgcgccgtctttggccttgtagttctggtactcgccgtcgatgacttcgtccatgcgacgctgcaggataccgtcgacgtccttggccagcagtgggtcccagaaacggccccagatgactttggtcacgttccactgggcgccgcggaatacgccttcaagttcctggatgatcttgccgttgccgcgaaccgggccgtcgaggcgctgcaggttgcagttgatgacgaagatcaggttgtccagcttctcgcggccggccagggagatggcgcccagggattccggctcgtcgcactcgccgtcgcccaggaagcaccagaccttctgcttgccttcagggatgaagccacgggcttccaggtacttcatgaagcgtgcctggtagatcgcttgaattggacccagccccatggaaacggtcgggaactgccagaaatcaggcatcagccaagggtgcgggtacgacgacaggccgttaccgtccacttcctggcggaagttgttcatgtgttcttcggtgatgcggccttccatgaacgcacgggcgtagacgcctggcgaggtgtggccctggaagtagatcaggtcgccgccgtgttcgtcggtcggggcctggaagaagtagttgaagccgatgtcatacagggttgcactggaagcgaagctggagatgtgaccgcccaggtccgaatctttcaagttcgtgcgcattaccatcgccatggcgttccagcgtaccaacgagcgaatgcggcgttccatgaacaggtcgccaggcatgcgtgcttcgtgggtaacggggatggtgttgcggtatggcgtagtgatggcgtaaggcagttgcgagccgctgcgggtcgcgagttcgcccatacgggtcatcaggtagtgagcacggtcttcgccttctttgtcgagaaccgattccagggcgtccagccattcctgggtttcgacgggatcgaggtcttgcatggcttgctccagggcggaaaggctaccagaatcggttgcctgaagtttgcgactggccttgtgggcagacgacataaattcttggatggccgaaggttgcttcggcgtcctgtagttttactacaaatcgtcggccatttcagcctttcgaatgtatatacgagtagtaaaactacacaagactgagcgtatggctcggtctggctggtgagcataatcgttattgttgatcttttgcgaacaagaaaaggtgaaagtttgatgttggctgccaaaatgaaattaatttcagctatttctaacctttgttcgacagtccttcatagagcgtggttcttgcgttcacaacacgtagccaattacacgccgatcaaggatagaccatgagccttccaacactggcccaactcccggccattctcttgccaaaagcccagcgggccgagcagtcatttcgtgacgcagtggccgcgctggacgatgatcatggactttctgcgtggacgccgcaacggtgggccgacttcgcccgcgtgtgcgccgccagtgatttcgtcattgaacagagtgttcgtgaccctttgatgttgcttgagctggccgccttgggcgaactggaccgaggtttcgcacctggcgagctgtgcgggcagattgctggcgccgtgcgacaagccgaaacagaagatgagctgggccgtgtgctgcgtcgccagcgcacacgccagcaagtgcgcatcatctggcgcgacctgacccgtcaggccgacctggtgcaaacctgccgcgacctctccgacatggccgacgccagcatcgaccaggcctaccagtggctgtaccaacgccactgcgtacagttcggcacgcccaccggccgacgcagcggcgagccgcagcacatggtcatcctcggcatgggcaagctcggtgcggtggagttgaacctgtcgtcggacattgacttgatcttcgcttacccggaaggcggcgagacggtgggtgtgaagcgcgccctggataaccaggagttctttatccggcttggtcaaaaattgatcaaggccctcgacccgatgaccgtcgacggcttcgtgttccgcgtcgacatgcgcctgcgcccctacggttcagccggtgcgctggttctgagcttcaacgcgctggagcagtattaccaggatcagggccgcgactgggaacgctacgccatgatcaaggcgcgggttgtcgccggcgaccaggtggccggtgcgcaattgctcgacatgctgcggccgttcgtctatcgccgctacctggacttctccgccatcgaagcgctgcgcaccatgaagcagttgatccagcaggaagtgcggcgcaaaggcatggccgacaacatcaagctgggctcgggcggtatccgcgaagtggagttcatcgcccaggcattccaattgattcacggtgggcgcgacttgagcctgcaacagcgcccgttgctcaaggtgctcggcactctggaaggccagggctatctgccaccggcggtgattgccgagttgcgcaatggctacgaattcctgcgttacaccgaacacgcgatccaggcgattgccgaccgccagacacaaatgctcccggacagccccgaagaccaggcgcgcattgcctttatgttgggttttgccgactgggacgccttccatgagcgcctgatgtactggcgtggccgggtggactggcacttccgccaagtgattgccgatccggacgaagaagagggcgaagaaagcgagttggtcgtaggcggtgagtggttgccgctgtgggaagagtcccaagatgaagaggctgcctgccgtcagttggccgaaggtggtttttccgacgcggccaaggccctcaaggcgttggcaggcctgcgcaacagcccgcaactacgcgccatgcagcgtttggggcgcgagcgtctggatgcgttcatcccgcgtcttctggcccaggcggtcgagcatgccaacccggacctggtactggaacgtgtgctgccgctggtggaagccgtcgcccgacgttccgcctacctggtgctgctcacggaaaaccccgatgccctgcgccgcctgctgaccctgtgcgccgccagcccgtggatcgccgagcagatcacgcgcttcccgctgttgctcgatgaattgctcaacgaaggccgcctgttcaagccgccgttggcgccggagctggccgccgagttgcgcgagcgcctgacgcgcatcccggaagacgaccttgaacaacagatggaagccttgcggcacttcaagctggcccaccgcctgcgcgtggccgcctcggaaatcgccggcagcctgccgctgatgaaggtcagcgactacctgacctggctcgccgaagccatcctcgaacaagtgctggccctggcctggcgccagaccgtggcgcgacacggctcgccgcagcgcctggacggcaccctgtgcgatcctggcttcatcattgtcggttatgggaaagtcggcggcatcgaactggggcatggttcggacctggacctggtgtttatccacgacggtgacccccaggccgagaccgatggcgccaagcccatcgacggtgcgcagttcttcacgcgcctgggccagcgcatcattcatttgctgaccacccagaccaactcgggccaactgtatgaagtggacatgcgcctgcgaccttccggcgcatccggtttgctggtgagttcattgggcgcgtttgagcgctatcaacaaaatgaagcctggacctgggagcatcaggccctgatccgggcgcgggtgctggtgggcagccaggatgtgggccaggcgttcgagcaggtacgggcgaacgtattgggacaggaacgggacctggcgaagctgcgccaggaggtcagcgagatgcgcgccaagatgcgtgacaacctgggcaccaagggcacggcggccggcaccggcgccaatgccttcgaagccacggcgctgttcgacctcaagcaggacgccggaggtatcgtcgatattgaatttatggtgcaatacgccgctttggcgtggtctgcgcaacatccatcgttgctgcgctacaccgacaatatccgcattctggaaggcctggagcaggtgggcttgatgcccgccgccgatgcccatctgctgcgcgaggtgtataaggcctaccgatccgccgcgcaccgccaggccttgcagaacgaggccggtacggtggccggggatcagttcgccgacgaacggcgccaggtgatgcgaatctggcaggcgctggagttgagctgaaacactattacggcggggaggcataagcctccccgcatcgtttgtggaaactacatgaatattctgatcgttgggcccagttgggtcggtgacatggtaatggcgcagacactgttccagtgcctgcgcgtgcgttacccggactgccagatcgacgtgctcgcccccgagtggagtcgcccgatccttgagcgcatgcccgaggtgcgcaaggccttgagcttcccgctcggccacggcgccctggaactggcgacccgccgtcgcatcggtaaatccctggcgggcgagtacgaccaggcgatcctgctgcccaactcgctcaagtcggcgctggtgccgtattttgccggcatccccaagcgcaccggctggcgtggcgagttccgctacgtgctgctcaacgacgtgcgcacactcgacaaagcccgctacccgctgatgatcgaacggttcatggccctggcctacgagccgggtgccgagttgcccaagccgtatccgcgcccgagcctgcagatcgacccggcgagccgcgacgcggccctggccaagttcggcctgaccctggaccgcccggtattggccttgtgccccggcgccgaattcggcgaatccaagcgctggccgtcggagcactacgcgaaggtggccgaggcgaagatccgtgaaggctggcaggtgtggctgttcggttcgaagaaggaccatccggtgggtgaagacattcgccagcgcctgattcccggcctgcgcgaagaggcagtgaacctcagtggcgacacgtccctggccgaggccatcgacctgctgtcctgtgccgattcggtggtgtccaacgactccggcctcatgcacgtggcggctgcgctgaaccgcccgttggtggcggtgtacggctccacctcgccgggcttcacgccgccgctggccgatcaggtcgaagtggtgcgcctgggcctggagtgcagcccgtgttttgaccgtacctgccgcttcggccactacaactgtatgcgccaattgctgccgcagccggtgaacgaagccttgcagcggttgcagggctctgcggtcgaggtccgatagtttgcgcgtactggtaatcaagacctcatccctgggcgacgtgatccacgccttgccggcattgaccgacgcggcgcgggcgatccccggcattcaattcgactgggtagtggaagaaggttttgccgagattcccacctggcacccggcggtcgacaaggtgatcccggtggcgatccgtcgctggcgcaaaaacatctggcaaaccatcaagagtggcgaatggcggcgcttcaagcagcaagtccagtcgaccaaatacgatctggtgatcgacgcccagggcctgctgaaaagcgcctggctgacccgttatgtgcgtgcgcccgtcgcgggtttcgacagaaactccgcccgcgagccgatggctgcgcgtttctattcgcgacgcctcgccgttgcgcgagggcaacacgcggtggagcgtctgcgccagttgttcgccgtggcgctcggttatgacttgcccaaaggcctgggcgactacggcctgagcacggaaaaactcctgggcctgccgccgaaaaaaccttttgtgctgctgttgcacggcaccacctgggacaccaagcactggcctgaagcctactggcgcgagctggccgagcgcatgggccgcctgggcgtcgacgtgaaattgccctggggtaacgccgctgaaaaagcccgtgccgaacgcctggcccagggcctgcaaaacgccgaggtgctgcccaagctgaacctggccggtgtcgcccgtgtattggccggcgcccgtgcctgtgtggcggtggacactggcctcgggcacctggctgctgcgttggacgtgccgaccatctccctgttcggcccgaccaaccccggcctcaccggcgcctacggcaagggccagattcatctggccagcgacttcccctgcgcgccgtgcctgcaaaagcaatgtacctatcaaccgacggccgacgacctgcgtcggttcgacctcaagcgcgagtcgcccctgtgcttcacgcgcctgaaccctgagcgtgtggcaagccgactgagcacgttgttactggctgaggagctgcactgatgcaactggcttttgtgctgtacaaatatttccccttcggtggcctgcagcgcgacttcatgcgcatcgccctggagtgccagcagcgcggccatcagattcgtgtgtacacgctgatctgggaaggcgacatcccgcccggcttcgaagtgctggtggcgccggtcaaggcgttcttcaaccatcggcgcaacgaaaaactcagcgcctggatggccgccgacctggccaagcgcccggtggaccgcctgatcggcttcaacaaaatgcccaacctggacgtgtactacgccgccgacggttgctttgaagacaaggcgcaaaacctgcggcactcgctgtaccgctactttggccgctacaagcattttgccgagtacgagcgcgcggtgttcgccaaggacgccaagaccgaagtcctgatgatttccgaagtgcagcaaccactgttcatcaagcattacgacaccccggtggaacgcttccacctgctgccgccgggcattgcccaggaccgtcgcgcgccgccgaatgccgccgaaatccgcgaaggtttccgcaaggaattcaacctcggtgacgacgagctgctgctggtgcagatcggttcgggcttcaagaccaagggcgtcgaccgcagcctcaaggccgtggccgcgttgccgtctgaactgaaaaaacgcacgcgcctgtttgtaatcggccaggacgaccccaaggtattccaactgcaaagcgctaccttgggcctgggcgataatgtgcagtttctcaagggccgcagtgatatcccgcgtttcctgctgggcgccgacctgttgatccacccggcgtacaacgaaaataccggcaccgtcttgctcgaagccttggtggccgggctgccggtactggtctcggccgtgtgtgggtatgcccactacatcgccgaggccgacagtggcctggtactggatgagccgtttgaacaagcacagctcaatcaatacctgacgcacatgctcaccgacactgcacagcgcgcggcctggagccgcaatggcttggccttcgctgagacggccgacctttacagcatgccgcagcacgctgcggatgtgattctggcggagccaaaacgatgaagttgattcttgccgaaccgttcaagactttatgggccgggctcgatgcctttgccgaagtcgagaaactgcaaggtgaagtattccgtgaactggcggcgcgtcgcaccctgcgtaccgaggtggatggccgtccgtatttcgtgaagatccaccgtggcatcggctggggtgaaatcttcaagaacctgatcaccgccaagctgccggtactcggggcgggccttgagtgggcggcgattcatcgcctgcaggcactcggcgtgccgaccatgaccggtgtggcgttcggcgagaagggcagcaacccggcggaccagcactcgttcatcatcaccgaagagctggcgccgaccctcagcctcgaagacgtcacgatcaactgggtcgccgaaccgcctgcacccgcgttgcgtcatgccctcacggccgagctggcgcgcatggtcggcgatatgcaccgggggggtgtgaaccaccgcgactgctacctgtgccatttcctgctggacactgccaagcccatcgatgcgaacaacatcaagctgtcggtgatcgacctgcaccgcgctcaactgcgtgcccacctgccgctgcgctggcgcgacaaggacctctccgcgctgtactactcggcgctggatatcggcctgacccgtcgcgacaaactgcgttttctcaagggctacttccgccagccgctgcgccagatcctcgccgagcaatcagcgtccctgagcttgatgcagcgcaaagccgacaagctgtatgcgcgcaagctgcgttatggggatgcgatctgatggcgggttggaacctggaacctgcgtacgccagcctggcggatgatttcggcagcctcgaagcggtcttcgccctgcaaggcgagcgcctgacccgcgatccgctgtcggaagtgatccgcgtggagcgcggcggggtcaactattacgtcaagcgctacatcggtgccggcaaagggctgcggcgctacctgggcaagccgcgggtcaagtccgaatggcagaacctcaagcgttttgccaaatggggcattcccaccgccgatgtggttgcctgggggctggagcgcaagggcctggcctatgatcgtggggcgatgatcacccgcgaactgccgaagaccgaagacctctcggtattggccgagcgcaacgatgcgcgcctgcacgatcccaagtgggtcaacgcggtgagccgtcagctcgccgaatacacgcgcaccatgcacgatcatcgctttacccataacgacttgaagtggcgcaacctgttgatcgatgaccaccagaccctgtacctgatcgactgccccaacggcgatttctggcgcgggttctggctcaagtaccgcatcaccaaagacctggcctgcctggacaaggtggccaagtatcacctgtccgccacccagcgcctgcgtttctacatgcaataccgtcagcgccagcacctgagtgcagctgacaaacagcgaattcgccacgtggtgaagtttttcgagggacgtgaatgagtgatttcctggcggctgaggaccgggcgctgctggagcgcaacggtttggcgacgttcgacgccctgtgggccaaacaactggatgcagtggatgaacccaacaccagtcgcggcggctggagcagcgtctttcgcctggagctcgacggccacggttattacctcaagcgtcagagcaactacctgacgcgcagcctgcaccgtccctttggcgagccgagtttctcccgcgagttccgtaatatcagtcgttaccgcaagctcggcatccctgccttgcaggcggcgttctacggcgaacgcaaggtgggcggcgagcatcgcgccatgctgctgacccgtgccctggacggctggaatgacctggattcgctgctggagcagtggccccaactgagcgatgcccagcaccgcgcgatcctgcgggcctgtggtgagcttgctcgtcggttgcacagcgtcggccaggtgcatggctgtttttatcccaaacatattttcatgcaggctaccggcgacggttatgccgcgcagttgatcgacctggagaaaacccgcccgctgctgttcggctggcgtgatcgggtcaaggacctggagccgttgctgcgacgtgcaccgcagtggtcggatgaacaggtacgccaactgttggccgcctatctggatcaatcgaaggacagcgcgctggtcgccacctggctgcagaaactgaccgcgcgccgtagtcacaaggaaaaccgttgatgcgtctgtccgagctgaaaaccgccggccgtacccccgagctgcccctgacccttgagctggccgatgcggcgggcccaggccagttgcaactgctgagcctgttgcgtgtgctgccgggcgagcgttatgtgggggcggcggtttggcgtggtcgtccggtactggccaaattgttggtgggcggcaaggcggcgcggcactttcagcgtgaactcggcggcgtgcgcttgctcgccgagcaaggcctgaccacgccgttgctgctggccgatggcttgcaggaaggcgagggcggctggttgctgttcgagttcatcgagggcgccgaaagcctggccgatgcctggcaggccatcgaagacctgccgccgctggctgacgagcaaaccgccgtgctggccgaagcgctgggtgcgatcgcccagatgcacaccaagggcctatggcaggaagacctgcacctggacaacctgctgcgccaggacggcaagctgtacctgatcgatggcgccgggatccgcgtcgaagaggcgggcaaaccgctgtcacgcaaccgtgtgctggaaaacctcggcgtgtttttcgcccagttgccgaagaatctcgagccgtttaccgaagaactgctggtgtactacctgctgagtaacggcgagcatgccctgccgctggaggccctggagaaacaggtgcgcaaggtcagcgcctggcgtctcaaggacttcctcaacaaagtcggccgcgaatgcacgttgttcagcgtggtgcgcggcgcctttgccttgcgtgcgatccgccgggaagaagaaccggccatgctgccggtgctggaacaggctgatgcgctgctggaccagggccatttgtacaagaccggcggcgccgccagcgtggccaaggtcgaggtggccggtcggccgctggtgatcaagcgctacaacatcaagggcttcgcccactggctcaaacgcttctggcgtccgagccgagcctggcactcctggcgcgaaggcaatcgcctggcgttcctcggcatcgccacgcccaagccgctggcggtgctggaaaaacgcttcttctggttgcgcagtcgcgcttacctggtcaccgaatacctgcccggcccggacatcatcgagcgcttcgcaccttacgttgaaaatggtgacgcgccggaaaacgaactgttggcgctggatcacctgttcgccgaactgatccgcgaacgcatcagccatggcgacttcaaggggcacaacctgttctgggacaaggaccgctggtcgctgatcgacctggacgccatgtgccagcacagctccgacacgagcttcgccccggcctatgccaaggacagggcgcggtttatgcgcaattggccgcaggacagcgcgttgtatcaattgattgatcagcggttgcccaaagtgagtcagtctggtggccccctgtagcaaagccgtagggcagtatgaatgttgatgcgtgactcggaaaacacgcaaacaacaggattaggcaccccatggcagatgaaaaactaacgtcccctcagttcatgctctttgaaagtgaaactgaggcagagcgcgctgcgcaagttcttgcagtgacgccgccgaaaggtgcgttcagcgacttcattgtgtatgtggatgaaagtggtgatcacggcatgcaggcgctggatgcgaactaccccatgtttgttctagcgttttgtgtttttcataaaagacactactgtgaaaaagtcattccggccctccaaaagtttaagttcaatcatatggggcatgatctcggcgtttttcaaggtagttgtcgtgtctcccgtcttgctaggcgaccttcacgacaactgtcagctccctttcgggattgaggtacaccgtcccgatagggtcccagttgcgtgtctcgcctgaccacctttcaggccttttttctctcgcttgcccatagattgccgccctccgggccaagatttcccggtcttttccctcgtggcgctgggcgggtgtca

SEQ ID NO: 128 - DNA, 301165 bp, Pseudomonas nodulensis
catcattttcaacagcgcagctttgcgttcttctgaatagaaaggcatgaccttactcttgccgcccccggaatacttttaaaaagcggaggacacgacaactaccctgacaccgggggatcttgttggcctgcatgaattggaaatacgtaaggaaaagggggctttctcgaacgtttttgtctctcgccagcacaaacatgcctttcttgaggagctgacaagcatcattgagtcgagcaactttgttttgatcagttgcgttattgataaggtcactcttcgggagcatcaaggtcccgtacataacccctaccatatggcgcttggattctgtcttgaaacgctttatgagtttctcagtgagaaaaatcagcagacagcgttgacccacgtcattttcgaacgacgagggcgtaaagaagataacgcgcttgagttggagtttcgacggatgtgcgacggtgccaatcgtttaggtattcgcctgccatttgacatcgtgtttgcgactaaacaggttaattccacggggttgcaacttgcagatctcgttgcaaggccgataggcatgagtgttctacggcgtggtcaggaaaaccgtgcctttgatgtgctcaagcgcaagttttactgcagcggaggacgaagcaaggtcggtgagggttatgagaactggggacttaaagttttccctaccgcagaaagcgaaaagccccgatgaaactcaccgaggctataacgccgaccgggatcccccagtccatttgcgccagattctatgcttgcgatttttgagtgtcaatgcagagtaattactgctcctcttgcagaatagatgggtgatcagaatcggtactcagcacctgctccggcataccacgagcgccctggcgccgcttcgtaatagcggttattgccgtcgccgacgatcaccgagccgacgtactggcggtcgagcaggttatccaggcgcagggtctggtggaaggtccagtgctcgactttctgctcaaagcgggcgcgccagttgaacacgctgtaggccggcgcagcgtgttggctgttggtgtcttcgacgtagacctggctgcggtacatgccttcgagggcggtgctgacccagtcgcggggcttccagttgagctctgcgaacagggtggtttgcggtacgccgggcaggtagttgcccttgtcgacggcggtgttgccgccgctgacgaagtcactgtcgtaggtagcttgcaggcgggtgtaggcgaggttggcggtccactgttcgctgagttggctttcgatgcccagttcgaagccgcggcgcagggtgcggccggcgttttggtaagtggtgcgaccgccgctggattgctgcaccaccaactcgtcttcggtggtgatctggaagactgcagcgttgatgcgggtgtcctggccaacgcgtgccttcaggccgacttcgtactgtgtactgaccgatggcttgagcgcgaagttaaagccgtttgagctgctggaatacgctgactccgcttgtgtcggggtttcaaagcctttgcccgcgctcacgtagccgtgcaggttgggggtaaacgcgtacatcacgctgaccgagggcgtgttcttctggtaagtcttgctgccgctgtcgttgccgtcgctgagaaaatgatcgtccacgtccatcttcatggtgctgtggcgcaggccggcttgcagggtccagtcgcccagcagccaattggcctgcacgaaggggtcgaggctggtggcggtgtcgatttcatcacggcccagtgcgcccttgacgccgtgcacgccgttggcggtgttggaatagccttggcgatcatcttcgctgcggtcgtagtcgaggccggcgatcaaggtcagttcgcccggagcgctggtgacgggttgtagccagtggatggagccaccgtagaacttgcggtcgaacgccaccacaccgcctcgcacgttggcggggttggtcgcaccgctggggaatttgtcaggaatcgacaagtactgaatcacactccgccgccccgtatacccattcacctgcagcgtcgcatcgccgaagtaccgctcgtaattcatgcccaattgctgatgatcgatacttttgcgcgtgttgtacgtcagcgcgttggcgctcaccgagcgcgggtcggccttgtacgccgcccacgtctgccccagcgggtcctgggtgccgttctgttccaggctgctgtagatcagcgccagtttgctgtcgtcatccggttggacgttgagcttggcgaaggtctggtcgcggcgtgcgctgctgtggtcgcggtagccgttggtgtccatgcgcgaagcgtcaagcacgaagccggcgccgttggtcgcgccttcggcgctcaggtggttcttgttcaggccgtcgctgcccaccagggtttcggcgccgatacgcggcgggccttcgccgtctcgggagaacatctggatcacaccgccggcattgctgccatacagggtcgcggcagggccgcgcagcacttcgatgcgttcggcagtgtcgaggttgaacgtggccgcctggccctggccgtccggggtgctggcgggaatgccgtcggcaatcagcttgatgccgcgcacaccgaacgccgagcgggcgccgaagccacgggaggaaatctgcaggtcctgggcatagttctggcggttctgtaccaccaggccgggcacgcgggacagggcctcggaggcgttgatgcccaattggccatcgctgatctgttcgcggctgatgccgtccaccgagtacggcagggcgaaggtcgggctggcgctgcgtgagccggtgaccacgctggggtcgaggaccagcggggcgtcttcagcccgagcggcatcgctcagggcgaacaggccaggcagcagcaaggtgaagcgggcgaggtttttcatcggtcagcgggaatccatggcgcgcataggcggtagacgcgcaaaggggcgcgagtttagtggctcgggcgatttttatcatttgggaatcgtcctacgctgcaaatcaatgttgctgctttgggtcacctgcccttgcgatgttagcgtggtcagccttggcaataacaatggcagatgggccataaggagagggtcatgaggatggggtcgaaagtcttgtgcagtgtgctgccgcttgtgttggcgggctgcggaaccatcaataccgtgttccggccagacgcggttaccagccagaacctcaaggactcgcgcagtcactgcgaaaacgtgccgcgcgtctacagcggggtgatctacgggttctgcacgctcaatggcgaaccggcgcccgacaagagcctgaaggacaacagcctgatcgaccatagcggtagcatgctacccattgtcgcggtggagtttgtcgcctccggcgtcctggacaccctggtactgccctacaccgtttatcgccaaagccaggacggcagcatcgagatcttccgctgatccctcttgacgctcgtcgctaacagcttcccgccgcttttacgctataatcccgccctttagctgtttcccgcccaggcgggaggcacacttttttcaggcgcaacccgcctgcatgcagactaaaagaggctagacccctgtggcattgacgattcttggcctgtccggcgcccttagccatgatccttccgcagccttgtatatcgacggcaagctgatcgcggccgccgaagaagaacgcttcgtacgtgacaaacatgcaaagaaccgcatgccctacgagtcggcgaagttctgcctggagcaggccggcatcaagccctccgacgttgacgtggtcgcgatcccgttcgccccgatcagcctgttcggcgaggcgcgctggcactacgccaagcgttactggtacgccccggaccgcgccctcgatgcgatcctgatgggcaaccgtcgctacaagcgttatcgcaacaagatcgtctggtgcctggagcaactgggcttcgatccgaagaaaatcaagatcgaaccggttgaacaccacctggcccacgcttccagcgcctaccactgctccggcttccaggagaaaaccgcgatcctcggtatcgacggtaaaggtgagtacgccaccacgttcttcggctacggcgaaaacggcaagatccacaagatcaaggaattctacgatccggactccctcggcggcctgtacggcgcgatcaccgagttcctcggtttcgagatgctcgacggtgagttcaaggtcatgggcatggcgccgtatggcgatgccagcaagtacgatttctcgcgcctggcttcgtttgagaacggtgagttggtgatcaacaccgactacgccaacgtcatcggcctgcgccgttacaaagagaagggcaaggggttctacttctcgccaaaactgatcgagtggctgggtcccaagcgcgaaggcgatatcgccgacgagccgtacatccactacgccgccagcatgcaggcgctgttcgagaaactggccctgcagatgatcgaccactacctgggcgacatcctcaaggacaccggcaagctggccttcgccggcggctgcgcgctgaacgtcaagctgaaccagaaaatcattgcgcgtgacgacgtgaaagagctgtttgtgcagccggcgtccggcgatgccggtactgccgtgggggcggcggcctacgtgtcccacgcccggggtgtgccggtggagaagatggaacacgtctacctcggcccgtcctacagcaacgaagacgtgatcgccgcgtgcgccaagcatgagagcaagccgaactggcgcaagatcgagaacatgccccagcgcatcgccaagatcatggtcgatggcaacccggtggcctggttccagggccgcatggagtttggcccgcgtgcactcggcggtcgttcgatcatcggttgcccaagcgccaccggcgtggcggaccgcatcaaccaccagatcaagttccgcgagcgctggaggcctttctgcccgtcgatgctcgacaccgtcgcgccgcagatgatcaaggtcgaccacccggcgccgttcatgaccttcacctttgaagtggccgaagagtggaaaacccgtgtgccggaagtggtccatgaagatggcacctcccgcgcccaggtgctcaagcgcgagtacaacccgcgctactacgacatgatgaaagagctggaagtactgaccggcaacggcgtgtctctgaacacctcgctcaaccgtcgtggcgaagcgatgatctgctcgccgaccgacgcgctgaacatgttcttcggctccgacctgcagtacctgatcatggaagacatcctggtcgtcaaggacggcgtggacccttatgacgccgtggtctaaatgctgaaccgcttccaggcgtggcgtgagcgtggctggacgcctgtcgaggccgaggtttacgcccaggcctggcagcggtttggcggcagcgttgcgacccatccgcagtttgtcgagcgcttggcgggcctggcgcagattccggtgcgttacctgggctgggaacaggacggtgaactccgaggggcgattgccacctgggggcgcgacctggccttgtccaaggacgtactcaagcgcagcggcaagaaaggcctgtttgacctgggcaatgccgagatcatcctgccgatcactgccgatcactgccgatgcgcagttgccggtgcgccatcgcgggcgttacctgtcagcgctgaacgagggccgcatcagcaccctcaagtcccaggccgagcagttggccatggcgcgtacccccgaagacctgtcgaagaagtttcgctacaaccagcgccgcgaattgcgtctgctggaagaggcgggcggcgtggtgcgggcggtgagcgagttttccagtgtggagctggcggcgatctactgcgatctgttccagcgccgctggggctttcccgccacaggcgccgagcgcctggccgaggtgctggcgctgctcaaagagttcctgatcggctcggtgctgtttctcaacgatgctccgattgccgtacagcttgtgtaccgcgtcgaggcgccggagtggatcagcatcgagtacgtcaatggcggtgtcgaccctgaaacccgggcattcagccccggcagtgtgctgagcttcctcaacacccaaagcgcctgggaacaggcgcgggccgtggataaaccgctgcgcttttccttcgggcgtgccgaccgcgagtacaaggagcgctggtgcaacccggtgccggtgttcagcgtatgagccgcaaacagcaactgctcaagcgccaccggcgcaataaacgcattgccctgctgatcgggctgctgctgttgatcgcggccggtgtgctggtggcctggtggttaccactgatcctcgcggttgtgctgtgggtggcccatgaagcctggtttgccgaccacctgttttattcgcccaaggacgactaccaataccgttttgcgtcgagtggccaacaggtcgggctgcgtctggaaggcggcaggttgctggcagagacgccgctcgagctggctggcgatgaaacgctgatcgtcgaagtgcagctcaaaagcaacctatgggggcgtttgtttgatcctgcagttgaatttctggacgatcgccaggcgttcgaacgtggggtggccggcaaacgttacctcaacctcaccggttcggcggcggcattggtcggcggtgaactgcgcctgcgcggtcgtttttgccgcgtgatcggacagccggtcttgtggctgtttcgccagcctgacgtagcccgtcagcgtgtgatggtgatcgccccccatgccgacgatgccgaactggccgccttcggcctgtacagccaggcggatgaaagctggatcgtgaccctgaccgcgggtgagatcgaggccgagcactatcagcaaatgggtttgcccaaggctgaagcggcgcggatcaaagggcgcttgcgtgcctgggacagcattgccgtgccgcgctgggccggcgtgcccgaggcgcactgcgtgcagttggggtatttctgcctgcaactgccggccatgcgtgacgcccccgatcaaccccaggcatcgcgcgaagcgcagttggacgatacgcggctgttccgccagttcaatgctttggcgttgccgggcgatgtagacggtgcgccgacctggaacaacctgattgccgacctgcgtgcagtgttgctcaaggcgcgtcccgaggtgattgtgttgccgacgccagtgctcgaccctcaccctgaccatatctgcgcccacaccgcggtggtgcaggcattgcaggggcttgagtggcagccgaccatgttgcttggctatgccaaccatctgcacgataacgaccgttggcccatgggtgattcaggcgctggcatcgctttgccgccgcagttcgatgccgcccaggtacttgagccctattgccgggtgctcagcctgagccagcagcaggacaaggccatggcgctgggtatgatgcatgatctgcagccccgtgcaccgttcaagcgccgggtgcgtcgcctgttgcagcaatggctggccggccgtggtccatcgccttacggcgagaacgaatttttccgcaaggctgtgcgccgtcacgagctgctttgggtgctgaagcaggactgaaattgacttttttcgtcgggctgcccgcgtgtagcagcccgattgcctcatggagtgatatgaagcctcgtttcaaggttttgcagttgcagcctgactacaacgtcaaactgaatgacttcgccgatctcggcgagcagatcgtcaaggcgctgccgacggagcggttcgaggtgacgtcagccttcctgagcggtcggccgcagccgggccagccgttgagcgtggcggatcattccaagtatttcgagtttcccgagaaggccctcaaaggcattcgcctgggcgccatgtgggaaatctacaagtactgccgtgagcagaaattcgatgtagtcatctgtaaccgcttcaagtcggtgaacatgatgctgtcgctcaatcgctggttgaagattccgttgtgcatcggtatttcccacggtttcggcgagtacgaacgcgcctatcgccggcgccagacgcgccgcctggtcagcccggcctggcgctttgtcggggtatcggcggcagtcagggattacctgatcggcctcaactgcggctttacccgcgataacaccaccttcgtcaccaatgctatcgatattccccaggccgaagccttgcagttgccacgcgagcaggctcgccaggcgctcgggctgccgctcgacgcacggatcatcggcgcgctggggcgcttggtgccgatcaagggccatacgcacctgctgcaggcgtttgcccgtctcaaggacaaataccccaatgtccaggtcggcatcatcggttccggccgtgccgaagccgacttgcgcgcggatatcgagcgccttggcctcactggccgtgcgcacttgctgggctttcgcgaggatggcctcaaatatgtacgcgctttcgatatctggaccatgccttccttgctggagggcctgggcctggcgttgctcgaaggcatgagtggacgcctgccggtgattgcttccaacgggccggccatgctgccgctggtggaaggggcgggtggtttgtcccacgagcctggcaatgtcgagcaactgacagcggccctggacacttatctggccatgagcgacgagcaattgcgcgccaagggtgaacaggtattccgttatctggaagagaaccacgccctggccgagttccagcaaaagtacctgaacctcatcgaaaccggtttgaaagaagtaggtagagcatgacagcgcaacaacccctggtctcggtgatcatcgcgtcctacaaccacggccggtacatcgaggagagcatcctcagcgtgctcggccagacgtacccgaacatcgagctgctggtggtggacgacggttccaaggatgacagtgtcgagcgcatccagcgcctgcaggccgagcacggctttgatttccaggtgcagcagaaccagggcctgaccgccacgctcaacggtgccatcgcccgcgccaagggtagcctgatcgcacccttcggctccgatgacatcatgctgccagaccgtatcgccacccaggtggcctacatggaaggtaaaccgaaggtgggcatgtgcgctggcaatatcgagttgatcgatggtgacggcaacctgcacccggagaaaaagcagcgccgcgacgtaccgtttcgcagcctggatttcgacgacatgttcatggaccgcaagcccttcccgccggcgccgaccatgttgattcgccgcgaagtgctggaagaagtcggcggcttcgacccactgatccctctggaagacctgctgatccaattgaagatcaccgccgcgggctacaccattgacgcgctcggcgtggtgatggcgcagtatcggcagcacgcaagcaacacctacaagaaccatcgctacatgatccagaacattctcaagacctatgcccatttcagcgagcacccggcctatgacgcggtgcgctacaacttcctcaactcgatgttcctgaagacggctgatcgtgaccggccactggcgcgggagatcctcaagcagatcccgctgaagttctgggggcgcaagaccttgcgtggcttggtgcggttgtacctggcgcccctcaggaagtgaggcggcgggaggtatgaaaaaggcgactatcagcagtgatagtcgccttttttatcaggtggcggggctggccaatgccagcacttgctcgcggatcttcgccgtggcgccttggctggcaacggacgcataacctttggccaactgttcgaagtgtgtctcgaacaaccaggcgcggtcctgtgggtagcgctgcatatggcgcaggttgcgctggcgcaacgcgttgcgcagcggcgacgggaagatgcgcaggtcggcaatatcgatcagggcaaactcaccgtcatccatcaacagcacgttacccaggtgcagcgaacggaagtacacaccgcgctcatgcagcttggccatgaactggccgaaacgttcgatcagcgactcacgcaggctgttgtccaggccttgcagggcctggcgcagggtcaggccgggcagtggcgcgtagctgacggcggtgctggcgtcgcgcaggctatagaggcctagaatctgcggcgtagggatgcccagggtgcgcaattgctcggcgttgctggcaaaccgctcggagtaggggttgaagctgcccgaggtgtaccagcggcgcgcacgaaagatcttcaggaagcggccgtcggccaggcgcaggactttcgggcccagcccgtcggcttcgatcacatgggcattgctgcacagctggtcgaaagctgcgggcttgagcgcttgtaccggcatgcgcaacaggctgtgacggcgctgggcgatgctcaggccggcaatgatcgccaacgggatccacagcacgaaccagtgctctttcgggcgtgacaggatgccacccccttcggtcagcccggcgccgatgccataggtcagcagcgatgaagccaggatgaagagtggctgggcgcgttctttcaggcccttgtacagcccccagccgatcatgaagatccacgggataaagccgatgatgccgacgtaatacagcacgcccagggcaaaactgtgcggctcgcgcagctgatagccgtcggacagggtcaggtacagctcggagtcgtagctgtggccgatccatgggtgttctgcgatgcgttgcagtgacatgccccacagttcaaggcgaaatgagctgcctcgttcggtaatggattccgggtatagcaggagcagtccaatggcccccagaaccaggcctgctatcagcaaagccgagcggcggttgcggctgacgaaggtcatccacaggatggtgagtgtcagggctaccagcggtgtgcgcgagcccgtggccagaaccgccgcgagcatgactgccagagccggggcgctgaaccacaggactttcaggcgctgggtggtcatgcagacatacagccagtagacgcagaagaaaccgaatagatgagagctgagcagcggattgtcgagagcgccacgcccaccgatcatgcgcatgcccggttcgaagcctttgacgaacgccaccaagttgcacaggctcaccaccagtgcgattaccgccgcactgaagaagatcggcttgaacagatcgttgcggtaatgcagcaacagcccgcagccaccaaacagcatgaaggtattgagcgggcgcttgaacaggtcggtgtcggcggtgggctcggggctccacagcaggctggtcagggcccaggcggagaagaccaggaaggcgagcgccaggggctcgcgcagtaacgctttcagctcccgggggcgcatgcacaacatgaacagcgtcggtacgctgaacaggatgtagacaattcgatgcagcacgtttcggttggatacgaagaacagtgagctcagcagcaacaacaagccaatgggtaaaatccacagaaccagaaagtcgaaaacgcgatttgagccatagatcagccgcttggagtgcatacaggaaagccattccgtgttgagaagccgaccatcttaaagtagtggctatataatgtcgccggttgaggccaaccggtttgagggtcatgcagggtgcaagtacaacagagaagctgtgctaaagtcagcctcctttttcaaaacgccgcgtgatatgaccgactccagtccgagcgcaagcccttcgagcttgaaaatatacttccgcctgctcagttacgttaagccctacgccggcttgttcgcgctgagtatcgtcggatttctgattttcgcgtcgacccagcccatgctggggtacatcctcaagtacttcgtcgacggcctttccaaccctgaagccgtgctattccctaccgtgccgttccttcgggacctgcaactgctgcaagccgtgccgctgctgatcatcctcatcgcggcctggcagggcctgggttcgttcctgggcaactacctgctggccaaggtttccctgggcctggtccatgacctgcgcgtgcagttgttcaacaacttgctgacgctgcccaaccgctacttcgacaaccacaactccgggcacctgatttctcgcatcaccttcaacgtgaccatggtcacgggggcggcgaccgatgcgatcaaagtggtgattcgtgaaggcatgacagtgatcttcctgttcgcctcgctgctttacatgaactggcgcctgacgctggtgatgattgccatcctgccgttgatcgcagtgatggtgagcacggccagcaagaaattccgcaagcagagcaagaagatccaggtggcgatgggcgacgtgacccacgtggcctccgaaaccatccagggctaccgcgtggtgcgcagcttcgggggtgaggtctacgaggaaaaacgcttcctcaaggccagccagagcaacaccgacaagcaactgcgcatgacccgcaccggggcgatctatacaccggcgctgcaactggtgatttacaccgcgatggcggtgctgatgttcctggtcctttatcttcgcggtgacgcatcggccggtgacatggtggcctacatcaccctggccggcctgctgcccaagccgattcgccagctctcggaagtcagctcgacgatccagaagggcgtggcgggtgccgaaagcatttttgaacagttggatgaagaggtcgaagtcgacaacggcaccatcgagcgcgacaaggtcagcggccgtctcgacgtacgcaacctgaactttacctacccaggcaccgagcgccatgtgctcaaggacatcagcttcaccgccgagcctgggcagatgatcgccctggtcgggcgctcgggcagcgggaagtcgaccctggccagcctgatcccgcgcttctaccaccacgcaagcggcgaaatcctgctggatggtgtcgagatcgaagactacaagctgctcaacctgaggaaacacattgcccaggtgacccagcatgtgaccttgttcagcgacaccgtgaccaacaacatcgcctacggcgacctggcgggtgcgccgcgggcggacgtggaagcggccgcggcggacgccaatgccaaggacttcatcgatcagttgcccaagggcttcgacacccaggttggcgaaaacggcgtgttgctgtccggtggccaacgccagcgcctggcgattgcccgtgccctcctgaagaatgcaccgctgctgattctcgacgaggccacgtcggccctcgacaccgaatccgagcgccacatccaggcggcgctggacaaggtcatgcaaggtcgcaccaccctggtgatcgcgcaccgtttgtccaccatcgagaaggccgacctgatcctggtgatggacgacggtcgaattgtcgagcgtggcacgcacagtgagctgctggcacagaacggctattacgcccgcctgcatgccatgggcctggatgcgccgatttccgcagacattacctgaacctcccggtaggagccggcaagccggctccttgcaaaaccctcccgcaaacctcccgcaaccctgtgctaatatcgcgcccctgttcattttgtatgtgggttgctccatgaagttgtccatgccgcgattcgatcaagcccctgtcttggtggtcggcgatgtcatgctcgaccgttactggcatggtggaacctcacggatttcccctgaggcgccggtgccggtcgtcaaggtcgagcaaatcgaagaccgtccaggtggcgctgccaacgttgccctcaatattgccgccctcggcgccccggcctcgctggtcggcgtgaccggcgacgacgaagccgccgacagcctggccaacagcctgcgcggtgctggcgtgcgtgcgttgttccagcgcattgcccaccagccgaccatcgtcaagctgcgggtgatgagccgtcaccagcaattgctgcgtatcgatttcgaagaacccttcgccaccgacgccctggcccttagcggccaggtcgatcagttgctcgaaggcataaaggtgctggtgttgtccgactacggcaaaggcgccttgaagaatcaccaggaactgatccaggccgccaaggcccggggcatcccggtattggccgatcccaagggcaaggacttctcgatttatcgcggagccagcctgatcacgccgaatctcagcgagttcgaagccatcgtcggcggttgcgccgatgagcacgacctggtgaccaaaggcgcggcactgatggccgacctcgacctcggcgccttgctggtgacccgtggcgagcacggcatgaccctgctgcgccccggccacccggcgatgcacttgccggcacgtgcccgtgaggtgttcgacgtcaccggcgccggcgacaccgtgatttccaccctggccgcctcgattgccgccggtgaagaactgccccacgctgtggccctggccaacctggcggcgggcatcgtggtgggcaagctcggtaccgctgccatcagcgcgcctgagttgcgccgtgcgatccagcgctccgaaggctcggagcggggtgtgctgagcattgagcaattgctgctggcgattgacgatgctcgcgctcacaacgaaagcattgtgttcaccaacggctgcttcgacatcctgcacgccggtcacgtgacctacctggaacaggcccgcgcccaaggcgatcgcctgatcgtcgcggtcaacgatgacgcctcggtcagccgcctgaaaggccctggccgtccgatcaacagcgtcgaccggcgcatggccgtgttggccggtctgggcgctgtggactgggtgatcagcttccctgaagcaaccccggaaaacctgctggcccaggtcaagccggatgtgctggtcaagggcggcgattattccgtcgaccaagtggtcggggcagatatcgtcagcgcctacggtggcaaggtcaaagtgctgggcctggtcgagaacagctcgaccaccgccattgtcgagaagatccgcaacaatgagtaagcaggttcttgtcaccggcggtgcgggctttatcggctcgcacctggtcgatgcgctgctcgccaaaggctacggtgtgcgggtgctggataacctctccaccggcaagcgcactaacctgccgttggacaatccgcgcgtcgaactgctggaaggcgatgtggccgatgccgagctggtcgcccgtgccgctgtcggcgcagccgcggtggtgcatctggcggcggtggcctcggtgcaggcgtcggtggatgatccggtcagcacgcaccagagcaacttcatcggcaccttgaatgtctgcgaagccgtgcgcaaggccggcatcaagcgcgtggtgtatgcctccagcgctgcggtatacggcaacaatggcgaaggcgcttccattgacgaagccaccaccaaggcgccgttgacgccctatgcgtccgacaagttggccggcgagcactacttcgatttctatcgtcgccagcatggcctggagccggtgatcttccgtttcttcaatatcttcgggccacgccaggatccgtcatcgccgtattccggtgtgatcagcatcttcagcgagcgggtgcagcagggcgtaccgattgccgtgtttggcgatggtgagcaaacccgcgacttcatgtacgtgggcgacctggtggacttgttggtgcaggcgattgaagcgcccgaggctcccttgggtgcaatcaatgtcggctggaaccgcaccacgacgctcaaggatgtgctgcaagccttggaagacatcgtcggcaaactgcccgaagtgacttacgggccggcgcgctccggggatatccggcattcgcgggcgaacaaccagcggttactggcgagttttaccctgcccgaacccaccccattgaaggtgggattggaacgcttgctcaaaggctgacgcgatgtgtagcctgattcaggccttggtttttttcttcggcacgatcttgcgcagcaccctttgggccaggcgcttcaatttcgactctttctcaggctcagccaggccttgctggcgcagccagtccttccagcgaatccgctcctcacgcaccaaccagccttcctgctgggcgaagctttccgccaggtacaaaccccgcgtgctcgccgggtacagctggtctttcttgacggtgtagagctcggccaggggctggccgtctttcaatggcatcaggtacaggtccgggcgttgacggtccaggcgggcgaccagttggtcgccttcaaggcgctcgtcgacatggaacaggctcagggatttggcttccttgggcacttccaggcgcaggtcatagatcaattgcaacgaggcggtgggcaggtgcacataggcgcgcgggcgttcgatcaactgggtggtggcgcagcgcaccgggcgagccgcgccggacagcgggctgaggcgaaagggcagggcttcgcggtaatgcagcgcggaggaatagggcgccggcagccaggtgtcgttgaagcgcccgcccagccagccttccggcgtttccagcaggcactcttcggcaatttcctggatggcggtgtgcagcggcaggttcagctcatgggcgggcacgtagccggagatcagtttgagtaccacgtcgccacggtcctggcggcgctggcgcaccagcacccagtaatccttgttttgccaatgcagggtcaggcgcaccgacacgccaaggttggccagctccagggcgaaacgctcggggtctgccacctccaccggcttgcgccgttgcagggtctgggcaaagttgagcggcatgccgacgctctggtagctcaggccttcgggggtggcttcgacgtgtagcggcagtgtcttgaagttgctggggttttttcttatgagcgttcgcggcatgtcggctccttcttgcgacggggtcggccgcgtcggcggcatcagagttgacgaatgacctgggcagcggtcgccacgttatgggccaggtgcagcggattaatggtcccgacaatagcactggcaacgcctgtttgcgcaaacaacaacatgaaactggcgcgaattggatccattccaggctccaggcaaacgtggccgctggccaaggcctttttcaccaggatgcccttgccgtgggccgccgcatattcaatgacggctttctcggcctgttcgttcaaattgtaggtgaccatcgcgcaatcgccctgttccagagccttcacgccaccctcgacggtcttgccggaaaagccgaaaccacggatcttgccttcctgtttcagcgccgccagggtctggtagacctcgcagtcattgaggatatgcaggtcgttaccgtcagagtgcaccagcaccaggtcgataaaatcggtttcaagtcgtttcaagctgcgttcaatcgacattcgggtgtgggccgcgctgaagtcgtggctggacgcgccattctcgaactcttcgccgactttgctgacgatcacccagtctttgcgctggccgcgcagcagcggccccaggcgttcttcgctcatgccgtaggccggcgcggtgtcgatcaggttgatgcccagttcgcgggcctggcgcaacagcatgcgcgcttcgtcgtcgccggggatctggaagccgctggggtatttcaccccttggtcgcggcccagcttgacggtgcccaggcccagtggcgagaccatcaggccggtgctgcccagggggcgatgaaggtcgtgcagggtaggcaggctcatggcaacagttgctcccaggcaggcacgccgatggtgggttttggcagctcgggcagcggctcgtcgacgcttgggcggatgccgtcacgttccaggctgttgatcacccgatcggcgaagtccggtgccaacgccaacttggtcggccagcccaccagcaggcggccttgttcggcgatgaaggcattgtcggggcgggtcaggcccgattgcaggggctcggcgcggtcgacgcgcagggtcgcccattgggtctggctcatgtcgatccacggcagtaactgcgccagctctttttgcgccgtagcgatctgttcctgcggcgtgcgcgccacgccatcggcctcggcaatatcgccgcccatgtaccacacccaattgccatcggcggccgggtgagtggtgacagtgatgcgtggcttggtgccgccgcccaagcagtgggcatacagcggcttgaggccggggcctttggcgatgatcatgtgcaatggacgtttttgcatggctggctggctgatgcccagcgcggtcagcagatcagccgtaccggcgccggcactcaacacgatgcgctgggcgcggatctcgcgaccgtccaccttcaagcccaccaaagcgtcgccctccagcaacggttcgatgtgctggccggcgagcaagccatcaccggccagttgggccaggcgctcaatcaggcttggcacgtcgatgaccagctcggccaggcgatagaccttgcccttgaaacggcggtcttgcagcgccggcggcaaatcgtcgcccttgacttggtcgacacggccgcgcacggccttgctggcgaaaaaactggtgaggttgccggcaagcgtgccgggggaccacaggtaatgcgcctcggataacaagcgcacgccgcgcaggtccagctcgccgttacccgccagtgcttcgcgccagcggcgcggcatatcggcaatggcttcggacgcgccggtgatggcgccatgcagggcgtatttcgcgccgccgtgaatgatcccctgggacttcacgctttgcccgccacccaaggtggcgttttccaccactaccgtggaaaacccctggcggcgcaggcgcgcattcagccagaggccggcaaccccggcgccgacaatcagaacgtcggtggaaataacggatggcatgggcgacctcagtgttcaagacaagaggcgcagtatacaggctgttgaggagtggtcagtgcccggcggttttcgagaacagctggatcaccaccacgcccagcacaatcaggcccatccccagcatcgccggaacatccagcttctgcccgtagataaacaacgccgcgatactgaccatcacaatgcccattccagcccacaccgcgtaggccacgcccaccggtacggagcgcaccaccagcgtcagcatccagaacgccacgccgtagccgacgattaccagcagcaatgggatgggcgtgctccagcccttgatggctttcatggaaacagtggcgatcacttccgagcagatggcgatggccaggtagtagtaggcggcattcatgggtcagtcctcgggtaaagcgatcagtcaaggctggcattctagagtcttgtcagatggggtaaagtcattacctatccgagtcagagatgggttaggtcatgagcgtgcagtgggatctggaacagatgcgcctgtttgtcagcgtcgccgaacagcgttcgttttcagcggtggcgcgccagcagcgcaaggctcagtcggcggtcagcaatgggattgccatgctggaggcggacctgggcgtcagcctgttcgagcgtagcagcggccgccagcctcggctgaccgcagccggcagcgtgctgctggaggaagcgcgcgaagtgctgcgccagtgcgagcggctcaatggccgggcactgtcattgacccgtggcgaggaagcttgcctgcgcctggcccaggatgaagccatgttgttccaaccggtgctcgacagcctggaggcgttggcgggccagtacccattgctggaggtgcagttgtccagcgcggcccagggtgatgtggcgcgcaagctggtggagcgcaaggctgacctgggcctgctgttctatcacgaccagatccccgaagccctggagcggcgcgtggttggcagcgtggagatggtcacggtatgcggggtgaaccacccgttggccaaggaaacctatgtaacgtgccagcacctggcgcagttccgccagttgctgatgtcgacccagaccagtgtctaccccggcagcgaagccgccagcccgctggtgtggcgcgccgacagtttctacgtgttggccgaatggctgatgagtggcctgggctgggcctggctgccccggcatatcgtgcagtacccgacctaccagcaacagatggtcgaactggacagcgaatggacgccgccggcgctggtggtcgagttggtctggcggcgcgacgagcatctggggccggcggcgcgcttcctggccaaacgatttgccgagtgcttgcaggcgatcgactgaaaaagccgataaactccgccgccatgaatagaactctctacagctgtctgttttacctggcgctgcccttggtggctttacgtctgtggctgcgcgcgcgcaaggcgccggcctatgccaagcgcgtcggcgagcgcttctcctatggcttgccggtgatgcggccgggcgggatctgggtgcacgccgtgtcggtgggcgaaagcattgccgctgcgcccatggtgcgcgggttgctggagcgttatccgacgctgccgatcaccgtcacctgcatgacgccgaccgggtccgagcgcatccaggcgttgttcgccaatgaaccgcgaatccagcactgctacttgccgtatgacttgccgtgcgcggccgagcgtttcctggatcgcgtacagcccaagctcgcggtgatcatggaaaccgagctgtggcccaatcatatccacgcctgcgcccagcgcgggattccggtggcattggccaatgcgcggttgtcggcgcgttcggccaagggctatgcgcgctttgccaggctgaccgcgccgatgctgtcggagatgagcctgtttgctgtgcagacgcaaaccgaagcccagcgcttcctggacttgggcgctcggccggaaaccgtcgaagtcaccggctcgatcaagttcgacctgaccatcgatccccagttgccggtacgcgccgccgcgttgcgcgcgcaatggggcgccagcgagcgtccggtgtggatcgccgcgagtacccatgagggtgaagatgaggtggtgctggcggcccatcgccaactgctcgacagctaccctaacgcgctgctgattctggtgccgcgccatcaggagcgcttcggcccgatgttcgagctgtgcgcacagcaaggctttgccacggtgcgtcgctccagtggggaacccgtcaccgcgaacacatcagtattgctcggcgacaccatgggcgagttgctgtttctctatgcgttggctgacagcgctttcgtaggcggcagcctggtggcgaccggtgggcacaacccactggaaccggcggcgctggccttgccggtgatcatgggaccacatgtgttcaacttcctcgaaatcaccgcgatgatgcgtgaagccggggcgttgcgcgcggtggacgatgcagaagggttggccgaagccgtgcgccagttgttcgaactgccgcaggatgcgcgcaagatggcgcaggcggggctcaaggtgatgcaggccaaccagggcgcgttgaagcgtttactggatggtttaggtcgactgctggctgactgaatcatcacctgactcaatgtgggagggggcttgcccccgatggcggtatatcagtcacctatacggtgcctgacactctgctatcgggggcaagccccctcccacatggggttgcagtggattcagttggcggggcgggccttgagttgttcggccgcagccttggccaggtccggcggcaggaagtcgcggtccgggttgtagtcggccttgaggtagcgcgccaggtcttgcagatcgcctgggttcaaggtgcccgcggcctgcttcaagcgcaggttgtcgaggatgtagtcgtagcggctgttgttgtagttgcgcactgacgcatagagctggcgctgggagtcgagcacgtcgacgatattgcgcgtccccacctgatagccgatttccgtggcttccaccgcgctctggttggagatgatcgactggcggcgcgcctgtacctgctccacgtcggtgttcaccgcgcggtgcaggttgcgggtgttttccaccacctggcggcgcaggccttcgcgctgctgctcggtctggcccagacgcgagtaggactcacgcacctgcgagctggtcagcccgccgctgtagatcgggatgctcaggcgcaggccgatggtgcgctgctcgacatctccacggtacggcgtgccgaaggcattcgggttgctgaaaccgagggcgtcgttgtcgcctttttcatattgcgccacggcgtccaaggtcggcgcgtggccggccttgcgctgcttgagggtttcttcggcggccgtgaccgcgtagttgctggccagcaggttcaggttctggcggccggcggtttcgacccaggccttggcgtcgttcggcagcggcggcagcaccggcagcgtgtggacgatgccctggattgagttgtactggcggttggtcagggtgatcagcgcttcgaacgcgtcctcgacctggcgttgggccaggatgcggttggcgcgggcggtgtcgtagctggcctgggattgcagcacgtcggtcttgtccgacaggcccacgtcaaagcgctcgttggactggtccagttggcgcttgaacgcattttcttcggccttggtcgaggccaggttgtcctgggcgcgcagcacggcgaaatagttttcggcgctctgcaggatcaggttctgttcggtcgccgacagttgcaacgcggcctgctcattggtggcctcggcggcttgcagctggaaccagcggtcggcgcggaacagcggctggctaagggtggcgcgccaggagtgcgcatcgcggttggcggtggcggccggggtgtcgatctgggtgcgcacgttgttgatatcggcaccgccggtcaggttcggcagcaagccggcacgggcctggggcaccacttccttttgcgcgccgtactgggcacgggcggcggccaggtcggcgttgttgtccaccgcttcctggtagacgctgaccaagtcggttttggcggacaagggcgcttcagctgcccagaccattccgttggtcgcacaagacacggcaagagccagtgaaagtttgcgcagcatgaggcgatccctagtttgaatattacggtgataatttagcgcccaaggctaaggctggccattcctggcgtcaagcattgtggcggcaaccgagtgtagtggtgctgactcggcgcaacaatcccgcaatcacgccattcatcacgctgaatgcaccgccattggcaatttgcccacggcatggtctagactggccgcgttcttgtcggggtgccttgttggaaggctgagatcggtaaataccggatcccgttgaacctgatcaggttagcgcctgcgtagggaacaagatttctcgtcacccggcgagtcctcttgtgcttcgtccgggatgttgttcgacaatcgaacagccctcgtgcgccaagcacagcactggttccagtgcgtccgtccgtcacaggttcgctccgacaaaaatccaccgcctggataagttggagagcccgtgatgactacaacattaaaaaacaccgtgcatttgagtgaatcggccaaggtcgactccggctccgtgcagccgtttacccgctcgcagaagatctacgtggaaggcacccgcccggacattcgtgtaccgatgcgacaaatcagcctggacgtcacccccaccgatttcggcggtgagatcaacgcgccggtcaccgtgtatgacacctccggcccctacaccgaccccaacgtgatcatcgacgtgcgcaaaggcctgggcgatgtgcgctcgccgtggatcgaagtgcgtggcgacaccgagcgcctgccgggcctcagctcgcacttcggccagcagcgcctcagtgatgccgagctgaccgcgttgcgcttcgcccacgtgaagaacccgcgtcgtgccaaggccggcgccaacgtcacgcagatgcactacgcgcgcaaaggcatcatcaccgccgagatggaatacgtcgccatccgcgagaacatgaagctcgaagaagcccgcgccagtggcctgctcgaccagcagcacgccgggcacagctttggcgccagcgtgccgaagatcatcaccccggaattcgtgcgcgaagaaatcgcccgcggccgcgccatcatcccggccaacatcaaccacaccgaactggaaccgatgatcatcggccgtaacttcctggtgaagatcaacggcaacatcggcaacagcgccctgggttcgtccatcgaagaagaagtggccaaactgacctggggcattcgctggggttcggacacggtgatggacctgtccaccggcaagcacatccacgaaacccgtgagtggatcatccgcaactcgccggtgccgattggcaccgtgccgatctaccaagccctggagaaagtcggcggcgccgccgaagacctgacctgggagctgttccgcgacaccctgatcgaacaggccgagcagggcgtcgactacttcaccatccacgccggtgtattgctgcgctatgtgccgctgaccgccaagcgcgttaccggcatcgtgtcccgtggcggctcgatcatggccaagtggtgcctggcgcaccacaaagagaacttcacctacacgcatttcgacgaaatctgcgaaatcatgaaggcctacgacgtcagcttctcccttggcgatggcctgcgcccgggttcgattgccgacgcgaacgacgccgcgcaattcggcgagctggaaaccctcggcgaactgaccaagaccgcctggaagcacgacgtgcaaaccatgatcgaaggccctggccacgtgccgatgcagttgatcaaggagaacatggacaagcagctcgagtgctgcgacgaggcgccgttctacaccctcggcccgctgaccaccgacatcgcgccaggttacgaccacatcacctccggcatcggcgcggcgatgatcggctggttcggttgcgccatgctctgctacgtcacgcccaaggagcacctgggcctgccgaacaaggatgacgtgaagaccgggatcatcacctacaagatcgccgcccacgcggcggacctcgccaaaggccatccgggcgcgcagatccgcgataacgccttgagcaaggcgcgtttcgaattccgctgggaggaccagttcaacctcggcctggaccctgacaccgcgcgttcctatcacgacgaaaccctgccgaaggattcggccaaggtcgcgcacttctgctcgatgtgcgggccgaagttctgctcgatgaagatcacccaggaagtgcgtgagtacgcagccaaccagcgcattgaagcggtggatgtggatgtggccaagggcctggccgagcaggcggagcggttcaagcaggaaggcagccagctctacaagaaggtctgattcaagacgtctgtaccggccttatcgggggcaagccccctcccacatgactcaaactgtgggagggggcttgcccccgatagcgatccagcaaacaacaaatgcccctcagagataacacccttgagcattcaaccgagtacttactcccccgatatcgcagtgccgagcgacaaaagagtcttcggcgcccgcgacctgttctccctgtggttctccctcggcatcggcctgatggtcctgcagaccggcgcgttgctggcgccgggcctgggcttgtccggttcgttgctggcgattttcctcggcaccctggtcggcgtcctgctgctggccgctgtcggcgtgatcggcagcgacaccggcctgtccgccatggccgcgctcaagctgagcctgggtgccaggggcgccagcctgccggcgctgctcaacctgctgcaactgatcggctggggctcgtttgaaatcatcgtgatgcgcgacgccgccagcctgttgggcgcgcgggcgttcagcgacggcagcctgttggccagtccattattgtggacgctgttctttggtggcctggcgaccttgctggcggtcagtggcccgctgacgtttgtgcgccaggtcctgcgcaaatggggcatttggctgctgctcgccgcctgcctgtggctgacctggaacctgttcgcaaaagccgacctcgccgtactctgggccaaggccggtgacggttcgatgccgttcgcggtgggctttgatatcgcgattgccatgccgctgtcatggctgccgctgatcgccgattactcgcgcttcggcaagcgcgcccaaagcgtgttcggcggcacggcgctggggttctttatcggtaatttctggctgatgagcctgggcgtggcctacaccctggcgtttgcgccgagcggcgaggtgaatgcgctgttgctggcgttggccggggctggcctggggattccgctgctgctgatcctgctggatgagtcggaaaacgcctttgccgatattcactcggcggcggtttccagcggcatgctgttgcgcttgaaggtcgagcacctggcgctggccatcggtgtgatctgcacgttcatcgcctgctttgcaccgttggcccaataccagaacttcctgttgctgatcggctcggtattcgcgccgctgttcggcgtggtgctggtggatcacttcatcctgcggcgccgtggtcagggtactgtcgccaacctgcgttggccggcgctgctggcgtggttgggtggcgtcgtgacgtatcacctgttggccaatctgtatccggacatcggcgcgaccctgccggcgctggtgctggcagggctgttgcagttaattctggctaaagccttcagcggcgtgcaggcaccagctcaggctggatgatgccgtccaggcgtgaatagggaatctgcaattcgacgtggcccagggcgtacggcgcgatggttttggtagggtacttgaggatcacgccaccataggtcagcgccacgttcggggttttctggaaggggtaggtcttcacatactccggctccaggctcaggcgggtgctgatcagccagctgttgtgggccacctgggcggctttccagaacgcgtcttccttgccgggcagcagcatgtcggtcagggtcagggccttttgccgctggcgcgaatagttgatgaatgcgcggcccggctcgccgtgggtggcgccctggtccaggtagctggacaattcgatgatcaccaagccgtcatgctgttcacgtaccttggcctgcaaatacatgctgttgcggggggcggcggttttgaggaattgctcgcgataggtctccaggctggtcggcaggggatcgctttgggtcatttccagcaggcgctgttcaatcaatgcgtccagcttggggtccttggcaaagtgcacggtgtcgatattcaccagcgggcaatcggcgctggcgcagcccggcttgctttgctcggtggcgtcgcgggtggcttccagcggagctttgtagcttggctggaacaggctctggcacgcgccgagggtcaatgcgatacaggccacggaggcgatttttaaaagcgacatgtaagtccttcgtctatcgataagagcgaaatttgtgcagcttcgactgccagcacggcagtcagttcgccactaagctgattagagtgtgtttgacgcccgccgtctatcccggcaactggaaaggggctgcatccagaggcatgagcgcgttaggatggcgccaattgcgcaggctcaacgaggaagggacatgacggattcagcaaaatcgacgccgagcacaatcgagattgttcagcgcgacaatgcctaccagggcttctacaagcttgatcgcgtacaactgcgccatgagaagttcgatggcggcatgagccgggtgatcaaccgcgaagtttttgttcgtcatgatgccgtgtgcgtgctgccctacgacccgcagcgcgatgaagtggtgctgatcgagcagttccgcgtcggcgccatggggcgtaccgacaacccgtggctggtggagatggtcgccggcctgatcgacaaggatgaagagccggaggaggttgcacaccgcgaagccgaggaggaagctgggctgacattctccgcgctgtggccgatcaccaagtatttcccgtcgcccggcggcagtaccgaatttgtccacttgtacctgggccgttgcgacagctcgggcgcaggcggcgtccatggattggaagaagaagctgaagatatccgcgtcaccgtgtgggccttcgaagatgccctgcaagcggtacgcgacggcaaaatttccaacgcagccagcattatcgccctgcaatggcttgcgcttaatcgcgcggaagtgagggggttatggcagtaaaggcacgggaacgttatcgagtcgacctgatcgggctgcaagccgcctgcgaggccaactatgcgcggctgatgcgcctgctccccgacatgcgccatgcccccgaggcacggcgcattggcgtgacccacggcgaccagatgctcggcgtgctggccctggaagtgatcgtcaattgcccctacaccaccaccctgcgcgtgcgccaggaacacagcctgccttggctgccggtgccgcagttggaagtccaggtgtaccacgacgcgcgcatggccgaagtgatcagcgccgaacatgcgcggcgctttcgcagcatctatccttaccccaacgtgttcatgcaccagcccgatgagaaagcacagctgaatgtgttcctcggtgaatggttgagccactgcctggccctgggccatgagttcgaagccgtgcggtagatgtgaactgcgtccgcttcctgggtttcctctttgtgtcctgccccagcataatcacgccaaacgtccattcctgcgattgccttgggagagcgccttgtcgagcgtatccaccgtgagccacgatgcaccggccttgctggtgcaactgtccgacagccacctgtttgccgaggccgatggcacgttgttgggcatgaacacccgtgacagcctgcaaagggtgatcgagttggtgcgtgcgcagcagccacgcattgatctggtgttggccaccggggatctttcccaggacggcacactggagtcgtatcagcagtttcgcgatatgacggcgcccatcggcgccccgacgcgctggattcccggcaatcacgacgagccgcaggtcatggcccacgccgcggtgcacagcgatttgctggagccggtggtcgatgtcggccagtggcgcatcaccctgctggactccgccgtacccggttcggtgcccggttacttgcaggacagccaattgcaactgctcgcccaggccctgagcgaggcgccaaaccgtcaccacctggtgtgcttccaccatcatccggtgtccatcggttgcgcctggatggaacccattggcctgcgcaacccggaggccctgtttgccgtgctcgaccgtttcccacaggtaagggcggtactgtgggggcatgtgcaccaggaaatcgaccgcgagcgcaacggcgtgcgcctgctggcgtcgccgtccacctgcatccagttcgcgccgggcagtgaggatttcaaggtcagtgagcaagcgccgggctaccgctggctgcgcctgcatgccgacggacggttggagaccggggtagagcgggtccagggcttcgaatttaccgtggactacggcagcaacggctattaactgtgggagggggcttgcccccgatggtggtggatcagtcacatctacagtgcctgacactccgctatcgggggcaagccccctcccacattggatcttcggtgtattgaaggccgaggtcatcacacacggccccgatccctgtaaactgcggctctttggctgagtcacggagagcccggcatgtccgcttcgatcctgtatatccacggtttcaacagtgcgcccgcgtccaacaaggccactcagttgatcaccgtgatgggcgtcatcggcctggctgatcaactgcgtgtaccggccctgcaccaccatccccgtcaggcgattcctcaactggaagccgcgattgccgaactgggtcggccactgctggtcggcagctcactcggcggctactatgcaacccatcttgccgaacgccatggcctcaaggcattgctggtaaacccggcggtcagtccccatcggatgttcgacggttacctgggcacccagaagaacctctacaccgatgaaacctgggaactcacccacgaccacgtgacggccctggccgagctggaagtaccggcgccccaggacgccgcgcggtatcaggtgtggttgcagaccggggatgaaaccctggactatcgtctcgcccagcagtattaccgagcctgtgccttgcgcatccaggccggcggcgaccatggttaccaggggttcgcccggcaattaccggcaatgttgagctttgccggcattggcgcagatcagtatcaatccttcgactttgctgcactgtaaagtcgcaggtcattttttaatcgaacgactcacgacgagaccccatggccactcccagcgctagctcttataacgccgacgccatcgaagtcctctcgggcctcgacccggtgcgcaaacgccccggcatgtacaccgacaccagtcggccgaaccaccttgcccaggaagtcatcgacaacagtgtcgacgaagccttggccgggcacgccaagtcggtgcatgtcattcttcacgctgaccactccctggaagtgtccgacgatggtcgcggcatgccggtggacatccacccggaagagggcgtgtcgggcgtcgagctgatcctcaccaagctccatgcgggtggcaagttctccaacaagaactaccagttctccggtggtctgcacggtgtgggtatttccgtggtcaacgccttgtccacgctggtgcgggtcaaggtcaagcgtgacggcaacgagtaccagatgaccttcgccgatggctacaaagccaccgacctggaagtgatcggcaccgttggcaagcgcaacaccggcaccagcgtgtacttcgcgccggacccgaaatacttcgattcgccgaaattctccatcagccgcctcaagcatgtgctcaaggccaaggccgtgctgtgccctggcctgctggtgacctttgaagacaaaggcaccggcgagaaggtcgagtggcattacgaagacggcctgcgttcgtacctggaagactccgtcagtgacttcgaacgcctacccaacgagccgttctgcggcagcctggccggtaataaagaagccgtggactgggcgctgctgtggttgcctgagggtggcgacagcgtgcaggaaagctacgtcaacctgatccccacggctcagggcggcacccacgtcaacggtttgcgtcagggcctgctcgatgccatgcgcgaattctgcgaatatcgcagcctgctgccacgcggcgtgaagctggcgccggaagacgtgtgggagcgcattgcgttcgtgctgtcgatgaagatgcaagagccgcaattctccggccagaccaaagagcgcctgtcctcccgtgaagcggcggcgtttgtctccggtgtggtcaaggatgcgttcagcctgtggctcaacgaacaccctgaactcggcctggccctcgccgaattggcgatcaacaacgccggccgtcgcttgaaggccagcaagaaggtcgagcgcaagcgcatcacccagggcccggcacttccaggcaaactggccgattgcgccggacaggacccgatgcgctccgagctgttcctggtggaaggtgactccgccggcggttccgccaagcaagcgcgggacaaggaattccaggcgatcctgccgttgcgcggcaagatcctcaacacctgggaagtcgatggcagcgaagtccttgccagccaggaagtgcacaacatcgccgtggccattggtgtagacccgggcgcagcggacatgagccagttgcgctacggcaagatctgcatcctcgccgacgccgactccgatggtttgcacattgccacgctgctctgcgcgttgttcgtgcagcacttccgcccgctggtggatgctggccacgtctacgtcgccatgccgccgctgtaccggatcgacctgggcaaggagattttctacgccctggacgaagccgagcgcgatggcattctcgaccgcctggtagccgagaaaaaacgcggcaaaccgcaggtcacgcgattcaaaggcctgggtgaaatgaacccgccgcaactgcgcgagaccaccatggacccgaacacccggcgcctggtgcaactgaccttggatgacttcgccgccacctcggaaatgatggacatgctgctggcgaagaaacgcgcgccggatcgcaagtcctggctggaatccaaaggcaacctggccgaggttctgggctgatgcgcacaggtttcgccctggcgatcctgatgttgagcagtttggcggccacccagttggctgccgcgcctgcggccgagctcaagctggtgtccgaacacccggtggatggcatgcgtggcggcaacctgtcgggcctggcgttgtgcggcaacgagttgtggacggtttccgaccgtgatgacgaccagatctaccgcctggacatcagcgcaccgacctggaaggctgaaacggtaaagatcgacgtgccaccggtgcccgagtccggcttgccgtgggggttgcgttcacgtaccaaggccgcgtctttcattcgcggtggcgacctggattttgaagggatcacctgcgatgccgccggtaaccgctacattgtcagcgaagcccatgcggcggtgctgcaagtgccggtgacgggcgcgcctgagtggttgaagatcgcacccagcatggtgcgtgaagcgcgggccagcggtatgttgctgcacttcaatgcattgtttgaaggcctggcgatcaaccccgaaggcaaccagatctggctggcggctgagcgtgaacggcgtggcctgatttccatcaagcgtccgcaaagcctgtgggactgtgacggcccctgcgtcttgctgagcgaagccggccaggaagtgcaaccagcccagttcccgaacgccaaggcggtgtccaaggattttgccgatctggcgctgttcaacggcaagctgtttaccctggaacgcaatgcgttccagatttgccggcgtgacgcgattacggccaaggttgagctgtgctggtcgtttgccgacgagaccctgacgcctgagcggcgttacccccagccttatggcctggcggaagctctggtggtggatgccgacggtgcctggctgggcatcgacaacaatttcggcccgcgtgccgatggtgaaaaacgccccatggtctatcgttttgccgcccctgccggtggctggagcgccaagccatgagccgatatttttttgaattgacccggcgccgtggcatttccgctgcgccatacccaagcatgatgaggcccgcatgagtgacatcctcgcagacagcttagacggcgtagaacgccggtcgctggctgacttcaccgaaaatgcctacctcaactactccatgtacgtgatcatggaccgtgccttgccgcatatcggcgacggcctgaagcccgtacaacggcgcatcatctatgccatgagtgagttgggcctggacgccgattccaagcacaagaaatcggcgcgtaccgtcggtgacgtactcggtaagttccacccccacggcgactcggcgtgctacgaagccatggtgctgatggcccaaccgttcagctatcgctacacactggtggacggccagggtaactggggtgcgccagatgatcccaagtccttcgcagccatgcgatacaccgaagcgcgcctctcgcgttactctgaagtcttgctgagcgaactggggcagggcaccgccgactgggggccgaatttcgacggaaccctcgacgaaccgctggtgttgccggcacgtttgccgaatatcctgctcaatggcaccaccggtattgcggtgggcatggccactgacgtaccgccgcacaacctgcgtgaggtcgccacggcctgcgtacgtttgctggatgagcccaaagccacggtggagcagctctgcgagcatatccagggcccggactatccgaccgaagcggaaatcatcacaccgcgcgccgacctgctgaaaatgtacgaaaccggcaagggctcggtacgcatgcgcgccgtgtaccacatcgaggatggcgacattatcgtcactgcgctgccgcaccaggtgtccggcgccaaggtgctggagcagatcgccgcgctgatgcaggccaaaccgtcgaaactgccgcaggttgccgacctgcgtgacgaatccgaccacgaaaacccctgccgcatcgtgatcatcccgaccaacagccgggtcgaccacgaagtgttgatgcagcatctgtttgccagcacggacctggagtccagctatcgggtcaacgtcaacatcatcggcctggacggcaagccgcagttgaagaacctgcgcaacctgctggtggagtggctggagttccgggtgcagaccgtgcgtcgccgcctgcaattccgcctcgataaggtcgagcgccgcctgcacctgttggacggcttgctgatcgcctacctcaatctggatgaagtgatccacatcatccgtaccgccgagcacccgaaagccgagctgatcgcgcggtttgagctgagcgagatccaggcggactacatcctcgacacccgcttgcgtcaattggcgcgactggaagaaatgaaactgcgcgacgaacaggacgcgctgctcaaggaacaagccaagctgcaagctctgctgggcagcgaagccaagctgaaaaagctggtgcgcagcgagctgatcaaagacgccgaaacctacggcgacgaccgtcgttcgccaattgtgcagcgtgccgaggcgaaagccctgacagaaaccgagctgctgccaaacgagaaaattacggtcgttctgtcggaaaagggttgggttcgatccgccaaggggcatgatattgacgccaccggtttgtcgtacaaggccggcgacgggttcaagaccgctgcggccgggcgttccaaccagtttgcggtgtttatcgactccaccgggcgcagttattcggtgccggctcacaccttgccatccgcacgggggcagggcgagccgttgaccgggcgcctgacgccgccacctggggcgaatttcgaatgtgtgctgctgccggacgatgatgcgctatacgtgatcgcgtccgacgcgggttatgggttcgtggtcaagggtgaagacctgcaggccaagaacaaggcgggcaaggctttgctgagcttgcccaacaacgccaaggtgatcctgccgcggccggtggatgatcgtgaaagcaactggctggcgtcggtgaccaccgaagggcgcctgctggtgttcaagatcagcgacctgccgcagctgggcaaaggtaaaggcaacaagatcatcggtattcccggcgagcgggtggccagtcgcgaagagtacgtgaccgacatcgcggtgatcccggaaggcgcgaccctggtgcttcaagccggcaagcgcaccttgtcgctgcgtcctgatgacctggagcattacaagggtgaacgtggtcggcgtggcaacaaactgcctcgaggcttccagcgagtggatgccctgctggtagaagcgccggtttaacgcgttttagagctctcgatctacgatttaacgcgtagatcgacgctttggcgctggagtcatggcgcatattcacggatgatatggcctttccagcgccggcgtggccgagcgtgtttaggttatttttagtattacattgtggtttgccttgtggcagccacctggatgggatgatgactgctccacgccttccttttattttcatgctcgctggccttttggggttggcgggttgcagcacccatcaaccggtgtcgctgtaccagctggacagcggaagtccggctcaacctgcacagaccgccggcatggccgttttgctcggcccggtggtcgtagccgactacctgcaacgcgaaaccctcctgcaacgtcagaacgatggaagcctgcaaggttccaccgatggtcgttgggcggggagtttgtcctctgatatcaaccagttgatgttgcgccaggtggcgggtcagttggacagccagcgtgtggtcctcgcgcctgcacccaccggttttaccccggatgtgcaggtgttgctgaccattacccggctcgactccggtgcgtcgcaaccggcaatcctcgacgcacaatggcgtttgatcgaccgtcgtggccaggtgcgcgataaccgcatcgtgcatttgcaggaacagcacaccggctccactgcgtcccaggtccaggcccagggcgtgctgttgcagcatttggcgcagcagttgtcggtggcgctcaagccattggccaaccagccgccgattgccgaagcgccgcgcaagcagagcgccccggcgcaggccaagccggccgctccggaaaagccgaagatgccaatggcgacgccgatccgtacggatatggaagtgttcaggttctgatctgaatcgcgcacaaacaaaaggcccgctgagtaagcgggcctttttgtttgtgcgcaatttgagccaggctgcggacccaatgtgggagggggcttgcccccgatagcggtagttcagttaatgatgtgttaactgatactcggctatcgggggcaagccccctcccacatgagtcctaccgttttatttggtgcgggtctcatgcatccgcgccaactgccgctccagcatcgacggatagggctccatcaaccgctccacacaactggcaccctcagggctggcaatcgggcggatacgtgcgcgttggcggatcagcgtgtcttcactgatcttgcgctccaccagcagcaggttgcggctgtgttgggacaaggccagggcatcctgggcgatctcggtgagcaacaggtcgatctggcttatgccgaacagatcgtcgcccactgtcaggccaagctgcagttgcagggtaatgccgctgtctgccacttcgatctgcagttcatgacccagggcgcgcagcagttcgccgcagcaaatggcgttggtcaggtagtcttcaccactgtcttcgctgtggaacagcatcagcgtgctgccatcgttcagagtgtgcagttcgctctggtacaacgaggcggcctggtcgaggcagtcacggtagcgttccagcaattcggtcaggcgtgcgcgtggcaggcgacgcagttgatcctgcgcacccagttgcaccgccagaacggcgctgtactgcggttccgcactctttaccggagccggtttggcggcgacggccggcgcgctggccgaggtgtcgcgcaggtcggcgaacgggtcttcgtcgtccagctcgtcttcttcagctttgaacgcctggcgggtggcaggttttaggcccgctaccggcgcgtctcccacttcaaactcaggctcatcgtcgaactcaggttctggctcaatctcgcgcaccaccggttccggggcgaagctggcgtgaagttggcgagcgaggtcgcctatttcgtcctggcgatcagtggccggggtatgttcgtcgatgtcccgcagccagatgcgcagttgcatcaagggcgtagagatatgccgtcccaggcgcaggctcagggccagggccaatgccagcaggatcgcgctgagaatgcccatgctttgcaggctgatggtcatcggctgctggaattgctgcatgtcgaggctgatgcgcagttggccggccttcacatcctgaaaggtgatattgctcgaatacaggccttcggcctcacccagcaggccgtttttcgggcgttgcccggcttcggccatgatccggttgtccacgctgtagatggcggcgtgggccaccagcgggttcttggtcaggttgttgagcagcacgttgaggctgaggatgtcgttggacaccagcaactcagtcgccgaggtggcggtctgtgtggtcaggctctcgcccagggcgtcggcttgttcgtgcatggcctgtttgaactgcaatcccatcacgcaggcatagatcaccagggccagggcgaccaggatcacgttatggctggcgatgcgtaatgcgatcggtacacggcggtggcgcagtgcccggaagatcagcaggaagaagttatcggtttttactggcgtgggccggttcacttgcgctcggctcttggtccgtgaagttgacgcgcagtatagcgacagccccatgaccggcaaagcgctggctgtgcccgatggtcactgaaagtgggtagaatgcggtttttttccagcctgggggtgcgccttgcgcgaaattgtcctgattaacatcactggggaagaccgcccgggtctgaccgcagccattaccggcgttctggcccagggtggtgtgaacattctcgacatcggccaggcggtgatccacgacaccttgtcgttcggcatcctggtcgaaatcccgagcaccgagcaggcgtcttcggtgctcaaggacatcctgtttacggcgtacaagctggaccaacaggtgcgtttcaccccggtgtccgaagccgattaccagcaatgggtggccggccagggcaaaaaacgccacatcgtcacgctgctgacccgcaaggtcaccgccgagcaactgcagcgtgtcagctccattaccgcgcaatatggcctgaatatcgaccatatcgaccgtttgtcgggtcgtatgccattggacacgccggccgacaagggcaagggctgcatcgagttctccgtgcgcggcgaaccggccgacccgcaggccctgcgtgccgagttcctcagcgtggcccaggagctgaacgtcgatatcgccttccaggaagactcactgttccgccgcaaccgccgcctggcagtgttcgacatggactcgacgctgatcgaggctgaggtcatcgacgagctggccaaggctgcgggtgttggcgagcaggtctcggaaatcaccgagcgcgccatggccggtgaactcgacttccgcgccagcttcaaggagcgcctggcgctgctcaagggcctggacgtgagcgtgctggacgccatcggcgcttccctgcgcctgaccgaaggtgcagagaccctgttcgccgagctcaagcgcctcggttacaagaccgccatcctgtcgggcggcttcacctatttcgccaagcaattgcaggctaaattaggcatcgactatgtgttcgccaatgagctggaagtggtggatggcaaggtgaccggtgtggcggtggagccgattgtcgacgcccagcgcaaagccgatctgctgaaggaattggcccacaaggaagggttgcgtctggagcagactattgcggtcggcgacggtgcgaatgacttgccgatgttggcaatcgcggggttgggcgtggcgttccgggccaaaccgttggtgaagcagtcggccaagcaggcgatttcgacattggggctggacggggtgttgtacctgttgggtttccgcgaccgcgatgggcagctgtaactgaagaaacgcagttcaaaaatgtgggagggggcttgcccccgattgcggtggatcagtcaacaaatctctgactggactgccgctatcgggggcaagccccctcccacatttgaccttcactgaattcaaatcaggctttcggcagtgcgatgccttggcccatctgcaccggcgtacccgccgccagttcttctgcccacttcacctgatccggcccgaacagcacaatcgccgtcgagcccagcttgaagcgacccaactcggcacctttttccaggtggatcggcgcacgtgcagcttcgtcgtagcggaaggttttcagctcacgcttcggcggtgtcaccagcccggcccacacggtttcaatcgacgccacaatcatcgcgcccaccaataccacggccatcgggccgcgttcggtgtcgaagatgcaggcagcgcgctcgttacgtgcaaacaactcgggtacgttttcagcggtggtctggttgaccgaaaagatgcgtccaggaatgtagaccatctcgcgcagcgtaccggccagcggcatgtgcacgcggtggtagtccttcggcgagaggtagatggtggcgaaatcaccgcccatgaacggcgccgctacggctgcatcgccacccagcagttccagcacgctgaagctgtggcctttggcctggaacacgcggccatgttcgatcggacccaactggctgaccgcaccatcggctgggctcagcaccgcgcctgcggtttgatccagcgggcgggcgccgtctttcagggcacgggtgaagaaggcgttgaagtgctcgtaagcggtgacgtcttctaccagggcctgggacatgtccacttgatagcgcttggcaaaccagctggtgaaggcgttcttgaaccaacgcacgcggcactcggcaatgcagccagccaggcgcgacagcaagtggtgcggcagcaagtactggctgaggataaacaactgctttttcataactgtccttaaaccttaaatctcgacgggggtgtcggggtggttgccccattcgccccaggaaccggcataacctttgactcgcggataaccgagcgccttggccaccaggtaggtgaagccagagcggtggtgagtctggcagtgggtgatgatttctttgtcgcgggtcagcccgaggtcttcgaggatctgtggcatgtcacggcggatgcgcaggttgcgcgccttgtccatgccggccgtccattcgaagttcaccgcgccgggaatgtgtccgcctttggcggcgaggaccttctcgccggagtactccagcgggccacgtgcatcccagatgcccaggtcggcagcacccaggcggctttgcaggtattcacgggtagcggtggggccatcatgcagcgtgagactgaccgggccaccgacaggtgcgggcacgtcggtggagaccgggcgttgttcttccagccaggccagcaggccgccatccaggtagtggtatttctggtggccgatcacgtcgagcatccagataaagcgcccggcccagccgccgccttcgtcgtcgtagaccacgtaggtcgcatccggggtatggcccagttcgccgaacagtttttccaggtcggccttggtgggcagcaggccgggtgccggcggctggcccagttgggtgcgtttggggtcaacgaaatgcgcgccggggatatgcccttcggcgtagcgggcggcgctggtgaggtccaccagaatcaggtgctcggcaccgaggcggccttgcaggtcgctggactcgatcaccagcggcaagccagagaagtcaggcatgtgaggtctcctgggcacaaatgttggcgataaaagacggcgattgtagcgcaagcatcaggcgctgcggttggtaaagcagtgcagggctttttcgatgcattgggcggttttgccgaaggcctgcacggtggtttccgagaacggcccgccaccctggtcggccaccatcagcatcaccaccttgccattgcaactcagggagcgcagcagcagatgttcgccggtgaacaggcggcgcaggatcggcggcagcaaggctgagaactgggcatggttctcggggttgagacgcacctgggcggacttttccagcagacgttgcagcagggtgctgttgaccacgtccaggctcaggttggcggcgtccttgggcaggccatcgacctggtgcacgcgcaaggtactcaaggcgcgatcggccatcagcagcatgacccgctgcatgccactggcgaccaaggcctctttggcgcacgtggtcaggtgcatcgcgttggcaaagcggctcggttccaccaagagttcagtgcagcgcttgcgccacacggccagggcctcggcggtgggcggtggcgccggcagcaggccgcgatgaatcttcgccacatgccacggccagatcagcgacagcgccgggtgccagaggtcgggcatcagggtggtacgggcactggtgacggcttgctggtggaccagttgctgcacctcgcccaacggttgttgcaggtacagcgctgtgagcaactgccagcgttcggtgtgcgggcaggtccaggattcctgggccgacatcgccaggccgttggccagcaacacggtattggccggctggttcagccagcgccgcaggttgggttcggcgtcgagcaattgctgatggcgcagtgggtcgtcctcacgggcgatatgcagggccttgaccagcaggcgctgctcgctcatcagcaacttatagccctgggacacccagatcggcaggtgccaggcttcggtcaggccgacgcacaggtcgagcaggcgtatgccgaacagttcctgctcgaccgcgcgggctgactggcccttgtggataacccgcagctcccactcctccagaagcttggggtaggccaccgccatcggccacagtggcgacaggaacaacaggctgccccagtggatgtcctgccacagccgcgccaggcgactgccgaacaaaccgttggcctgctgcgacgcgtgctggctgaccagcaacagttggcgcaatgccacggggatctcgtgtgcgggcaccgagggcaggcgcgccagcaattcttcggcgcgcttgaggcccaggcgattgagcgccacctcgaggttttccgccggttccgccaggctgccatgggtgtggctgttggcctcgcgcatcacgctgagcaccagggccgggctgttttgcatcagctcggcaatatcccgcaacgaactgcggttatcacggatgcctttgcacacgcggtcgtggctggcctggggaacgggcagcagcacatcgtccaggcgcttgatccaagcggcgagagagttgggttttgcagttgggactgtcgtttcattagccatgattggggcgcgatcatcacttgcggtctacacgcccggagcgggccgaactggcttttcgccttaacgggctatagtctggcgcagttttgccgataagtagaacaagagttttctgctacacccaatatgtccatgaacccgacggcgcaagtactcatctcctatggctaaaattatcggcatcatcgtcgtcttcgcaagcgtgctcggcgggtacgtcctgtcccacggtaaaatcgctgcgctgatccagcctttcgaggtgatgatcatcggcggtgcggcactgggtgcattcctgcaggcgaaccccggctacatgaccatgcacgtgatcaagaagtcgctgggcatgttcggttcgcgcttcacccataccttctacctggaggtgttgggcctggtctacgagatcctcaacaagagccgccgcgaaggcatgatggccatcgaggccgacatcgaagacgccgccgccagcccgattttcgccaagtacccggccgtgctcaaagatgagcgcatgaccgcctacatctgtgactacctgcgcatcatgtcctccggcaacatggccccccacgagctggaaggcctgttcgacatggagttgttcagcctcaaggaagagctggagcacccctcccacgcggtgaccggcatcgctgatggtatgccgggtttcggtatcgtcgcggcggtactcggtatcgtggtgaccatggcatccctgggtgagggcgaccaggccgctatcggcatgcacgtgggtgcggcgctggtcggtaccttcttcggtattctcgcggcctatggcttcttcggcccgctggcgacttccctggcccatgacgccaaggaagaagtgaacctgtacgaatcgatcaaggccagcctggttgcttccgcttccggcatgccgccgtcgctggcggtggagttcggccgcaaagtgctgtaccccaagcatcgcccaagcttcgccgagctggaacaagcggttcgcggtcgctaagccatggaaaacaaccagccgataattatcaagcgcgtcaagcgcttcgctgcggggcaccatggtggcgcctggaaaatcgccttcgccgactttgcgacggcgatgatggcgttcttcctggtgctgtggctgatgtccaccgccacgccggaacagaagatcgccattgccggctacttcaaggacccgattggtttctcggaaagcggcacgcccttcgtgatcgacctgggcggctcgccgcagttggcgcctgagcgcaccatcaacccggaggtcaagaccgaagcgcctcaggaaaaaatcccgatcgagcgcgatactgtcgagtctatggccgaacaggtcgagcaggagcgtcttgaactgttgctgcaagaactgcagaccaaggttgaggaaaacccgcaactgttgaagttcaaggatcagatttcattcgagatcaccccggacggcttgcgcatccagatcaccgacgcagccaaccgcccgatgttcgactccggcagtgcgcgcttgaagccgtactttgaagacatcctgctggccatggccgacaccatcaaggcggtgccgaacaagatcagcatcagtggccacaccgacgccaagccttacgcaggccagggtgacttcggtaactgggagctttcggccaaccgcgccaacgctgcacgtcgtgcgctggtggccggcagctacccggacccgcaagtggcgcgcgtggtagggtttgcatcgtcgcagctgtttgaccccaaggacccgttcaaccccatcaaccgccgtatcgatatcgtggtgctgaccaaaaaggcccaacgtgcgatcgaaggtgaccagcccccagcggcgcaacctactccgggggccggcgcgccgggtgaagtaccggccgatccgaacgcgattccgccaggacaggagccgttgccggcgcatgagctgcgtcagaagctgaacctgtttgatgacggtggggtgaaggatcctacggtgcctaagacgggttcttaagcaactaaggtctttttgtggtgagcgggcttgtcccgcgttgggctgcgaagcggccctgatccaaacgccgcatttcttccaggtaaaccgcgtcatcaggcttcggggctgctgcgcagcccaacgcgggacaagcccgctcgccacaatgttgtctgtgcggctcaataactgctttcgggcaagctcgcaataatcgaccgatagctgttcatccgctgttgctgcacgcgcccatcttccagggccttgagcaacgcacagcccggttcgcggtcgtgtttgcagtcgcggaagcggcaggtgccgatcaggtcgttgaattcgataaagcccgcttcgacatcgcagcggctgacgtggccgaggccgaattcgcggatgccgggggagtcgatcaactcgccgccgccggggaagtggaacaaccgtgcggtggtggtggtgtgggtgccctggccggacagttccgacagtgggcctacgcgggtgtcgacttccggcagcaggctgttgaccagcgaagatttacctacgccggactggcccacgaacacgctgatgcgtccgtccaactgctgttgcagctgttccatgccattaccgtgatgcgccgaaacctccagcacggggtagccgagggtgcggtacaccgccagtaacgcgttgagcgccggggcattctgctcgtcgatcaggtcgaatttgttcagcagcaacagcgggcggatgccggcatgctcggccgccaccaggtagcggtcgatcaggttggcatggggctcgggcagtggcgcaaacacgatcacgatcatgtcgacgttggcggctaccggcttgagctggccccggctatccgggcggcgcagttcggtggtgcgcggcagttgggcgacgatcacgccgatgccctggttgccggcacgccacacaaccttgtcgcctgtgaccagcgccggcaggttggcgcgcaagtggcagcggaacacctggcctgcgagttcgccttcgagcgcctcgacttcgacctgcacgccgaagtgcgcgatcaccaggcctgtttgttcagggccgaggtcgccgccctcgagcgcttccacggcggaggattcacgtttggcggcgcgcgcggcgcgttcaccctgaatcttttcgatgcgccagttttggcgacggttgagctggcgtttggccattggtgttccgtgtcgataatgcaaaggttgggtaaaacggtcgcgagtctagcacggccccgcctgctaaactgcgcagctacgccaaggtgccaagagaatcaaaccatgcaaaacccacagaacctgatttggatcgatctggaaatgaccggcctgaaccctgacaccgacgtcatcatcgagatggccaccattgtcaccgacagcaacctcaacaccttggccgaaggtccggtgatcgccatccaccacagcgacgccgtgctcggcaccatggacgagtggaacacccgcacccacggcaactccggcctgacccagcgcgtgcgtgacagccgcgtcagcatggccgaagccgaagccgaaaccatcgccttcctggaaaagtgggtgcccaagggcaagtcgccgatctgcggcaacagcatctgccaggatcgccgcttcctctatacgcatatgaaagcgctggaaagctacttccattaccgtaatctcgacgtatccaccttgaaagaactggctgcccgctgggcgccggaagtgaaggacagcttccataaaggcagcacgcacctggcgctggatgatatccgcgagtcgattgccgagctgcagcattaccgcaagcatttcatcaaggcctgaactccctcaatggtgagccggctcgccacagttttgcaaggatcgccctcatgctgctgatgctctacctcatcgccatcactgccgaagccatgaccggcgcgctgtccgccgggcggcgaggtatggactggtttggtgtggtgctgatcgcctgcgtgacggcgctgggtggcgggtcggtgcgcgatgtgctgctggggcattacccgctgacctgggtcaagcacccggaatacctggtgctgacctccgtcgccgcgctggtgacgatctttatcgcgccgctgatgcgccgcctgcgttcgttgttcctggcattggacgccctgggcctggtggccttcaccctgatcggcagcatgactgccctggaaatgggccatggcatgctggtggcgtcggtcagcggcgtaatcaccggcgttttcggtggcatcctgcgggatatcttctgcaacgacatcccgctgatcttccgccgtgagctgtacgccagcgtgtcgttcctggccgcctggttctacatgctgtgcctttatcttgagctgcccagtgagcaatcgatcctgctgacgctgttcagcggctttctactgcgcttgctggcgatccgtttccactgggaaatgcccaagttcgtctacaacgacgacgtgcactagcgcgtcgcgtgctggttcagcgcccattccacatgttcgcgcaccaggtccgagggatattcccgccgcgccttcaaggcttccagcaccggaatgcttgatggtgcgttgcccaggcccaccgccaggttgcgcaaccagcgctcatagccggcgcggcgcaggggtgaaccttcggtgctgctgaggaatttatcctcgtcccacataaacaactcggccagttcggcgttatccaggttgtggcgtggcttgaaatcgctttcggtggtggcgcgggcgaaacgattccatgggcaaacgatctgacagtcatcgcaaccgaacacgcggttgccgatcaacgggcgcaggtcttcggggatcgcgttcttgagctcgatggtcaggtaggaaatgcagcgccgggcatccagcacgtaggggcctacaaaggcattggtggggcagatgtccaggcacgcggtgcagcgcccgcaatgttcggtgctgtggggggcatcgactggcagcggcaggtcgacaaacaactcgctcaggaagaagtagctgcccgccttgcgattgagcaccagggtgttcttgccgatccagcccagcccggctttttcggcgatggctttttccagcaccggtgcgctgtcgacgaaggcgcggaagccgaacgggccgatctgcgcctggatgcggtcggccagttgctgcacgcgcttgcggatcagcttgtggtaatcgcggcccagggcgtaacgcgagatataggctttttccggtttggccagcagttgcgccatttgtgtgtcgccgggcaggtaatccatgcgcagcgagactacgcgcaaggtgccgggcaccaactcctccggatgggagcgtttgctgccatgggcgcccatgtaatccatctcgccctggtaacccgcgtcgagccagcgttgcaggtgctgttcatgctcggccaggtccaggccgctgatgccgacttgctgaaagcccagctcgcggccccagtctttgatcgattgggcgagggcaggcagatcggtggtgatggcaggcatgagacaagggaaaccgcaggttagataggtataattctgccagacatcggagcttgaagacgcatgccgcagacaaaacacgcaataaccgacgtacaaccgctgttgcacggccatttgccgcaactcgctgcgcgttccccggacgcccataaaggccagttcggccacctgttggtcatcggcggtgaccgtggctttggcggcgccgcgctgctgagtgccgaaagcgccctgcgcagcggcgcgggcatggtgtccctggcgacgcgcctggaacatgtgcccgcggccctggcgcgcctgccggaagtcatgaccgttggggtgagctcggccaatcaattgatgggcctgctggaaaagatctcagtcatcgtgatcggacctggactcggtggtgcgtcctggggcaaaagcctgctttccgtcgccgccaacgccagcctgccgcaggtgtgggacgccgacgcgttgaatcagctcgccatcggcagtgtcactctgccggctgattgcgtgatcaccccgcatccgggggaggcggcgcgcttgttgggcgtgtcgacagccgaggttcaggccgatcgtcttaaggtggcgcgcgcgttgagccagaaattcaacgcagtggctattctcaagggcgcaggcagtttgattgccagcccggacgggcgcgtttcacgctgtgaccaaggccacccggcgatggccacggcagggctgggcgacgtgttggccggcctggtgggtgcactgctggcccaaggcatgcccgcctatgaggcaagctgcctggctgtgtggctgcacgcgacggcgggagatcgccaggggacgttcggtcgcgggttggccgccagtgatctgatccctgccattcgtcaattgctggaggagcagtcaccgtgtctgaagtaattcttttcctggccgatgaagaggccatggttgccttcggccagcgcatcgcccaggtcacggcgggagcggggctgatctttctcgaaggcgacctgggggcgggcaagaccacgctgtcgcgggggatcattcgcgggctgggccacacaggggcggtaaaaagcccgacgttcaccctggtagagccctacgaagtcggcgacgtgcgagcgttccatttcgacctctatcgcctggtcgatcccgaagaactggaatacatggggatccgggattacttcgacgaagatgcgctgtgcctgatcgagtggccagataaaggcacaggctttttgccaaagcctgacctgaccattaccattacgccgcatgagcatggacgtcagttgaagttgttgccccagagcgtgcgcggccagtcgtggtgcgcggctttggcattggaattcaaataattggtggggttaggtatgcgctttcgcgcgttggttgctgtcgtgggggtgttgcttgcggcaatgactgtcaatgctctggctgcttcacaggtgaagagtgttcgcctgtggcgagcgccggataatacgcgcctggtgttcgacctgtctggcccggtccagcacagcgtctttaccctgacgtcgcctgatcgcctggtgatcgatatcaacggcgcgaccctggccgcgccgttgaaagtctccaccaccaataccccgattaccgccatgcgctcggcccaacgcacgccgaccgatttgcgcgtggtcatcgacctgaaaaaggtcgtgaccccgaaaagcttctccctggcgcccaacgcccagtatggcaaccggctggtggtcgacctgttcgacaacgccgccgatgccgcgccgccgcctgcgcccaccccgagcgtggcaacggtgccggcggtgccggtcaacccgtcgcaaccgcaggtcaagctgccaccgccgccaccggccccggccggcaaacgcgacattattgttgtgatcgatgccggtcacggcggcgaagacccgggggcttccggctcgcgcggccagcatgaaaaagacgtggtacttgccatcgcccgcgagctgcagcgccaggtcaatggcatgaaaggctaccgtgccgagctgacccgtaccggcgactacttcattccgctgcgcggccgtaccgaaatcgcccgcaagaaaggcgccgacctgtttgtgtcgatccacgccgacgccgcgccttcggccgctgcctttggcgcttcggtgtttgccctgtcggatcgcggcgctacgtccgagaccgcgcgctggctggccgacagcgaaaaccgttccgacctgatcggcggcgccggcaacgtgtccctcgatgacaaggacaaaatgctcgccggcgtgctgctcgacctgtcgatgaccgcttcgctgacctccagcctgaacgtgggccagaaggtgctgagcaacatcggccgggtcacctcgctgcacaagcagcgtgtggaacaggccgggttcatggtgctgaaatcgccggatatcccctcgatcctggtggaaaccgggtttatctccaactccaacgaggcctcgaaactggccagcgccagtcaccagcaggcgctggcgcgttcgatcagcgccggtatccgccagttcttccagcagaacccgccgccgggcacctatatcgcctggctgcgtgactcggggaaaattgcccagggcccgcgtgaccatcgtgtgcagccgggcgacaccctggccatgctggcggtgcggttccaggtgtcggccgcgaccttgcgcagcgccaacaacctgaaaaccgatgaattgaaagtcggccaggtgttgaccatccccggcactgaattggcggcacaataatgagtgaatcactcctcgacagcggatcgcgcattgagctgctgagcccgcgccttgccaaccagattgccgccggcgaggtggtcgagcgcccggcgtcggtgatcaaggagctgctggaaaacagcatcgactccggcgccaagcgcattgatgtcgatgtggagcagggcggcgtcaagttgttgcgcgtgcgtgacgatggcagcggcatttccgccgatgacctgccgctggctctggcgcgccacgccaccagcaagattcgcgacctggaagaccttgagcgggtcatgagcctgggctttcgcggtgaggcgctggcttccatcagctccgtcgcccgcctgaccctgacctcccgcacccgcggcgccgaacaagcctggcaggtggaaaccgaaggccgcgacatggcacctcgggtgcagccagcggcgcatccggtcggcacttcggtggaggtgcgcgatctgttcttcaacaccccggcgcgacgcaaattcctcaaggctgaaaaaaccgaattcgatcacctgcaggaagtcatcaagcgcctggccctggcccgcttcgatgtagcgttccacctgcgccacaacggcaagaccatcctcagcctgcatgaagccaacgatgacgccgcgcgtgcgcgccgggtgtcggcgatttgtggggcgggcttcctggagcaggcgctgccgattgaaatcgagcgcaatggcttgcggttgtggggctgggtcgggttgccgacgttctcccgtagccaggcagacttgcagtacttctttgtgaacggccgcgcggtacgcgacaagctggtggcccacgcagtgcgccaggcgtatcgcgacgtgctgttcaacgggcgtcacccgacgttcgtgctgttctttgaggtcgacccctcggtggtggacgtcaacgtgcaccccaccaagcacgaagtgcgcttccgtgatggacgcatggtgcatgacttcctctatggcaccttgcaccgcaccctgggtgatgtgcgcccggatgatcaattgtccgcaccgattgtgacggcagtggtccgcccgagtggcccggaggccggtgaattcggccctcagggcgaaatgagcctggcggcgaacctgctgcaatcgccgcagtcgcagccgtcgtacaccgcgccgaatgccggctccggctcgggttatcagtaccaatacaccccgcgcccgcaatcggcggtgccggtggccgaagcccaggctgcgtatcgcgagttttttgcaccgctgccgggggctgagccgggggcgccggtcgccttaccggagggcggtggtgatattccaccgctgggttatgcgttggcgcagctcaagggcatctatatcctggcggagaacgcccacggcctggtgctggtggacatgcacgccgcccacgagcggatcatgtacgagcgcctcaagatcgcgatggccagcgaaggcctcagcgggcagccgctgctggtaccggaatccctggcagtcagccagcgtgaggccgattgcgccgaagagcatcacagcgtgttccagaagctgggctttgaattgcaacgcctgggcccggaaaccctggccatccgccagattcccgcgctgctcaagcaggctgaggccaaccggctggtggcagacgtgctggcagacctgatggagtacggcaccagtgaccgcatccaggcgcacatcaacgagctgctcggcaccatggcctgtcacggcgccatccgtgccaaccgccgcctggccctgccggaaatgaacggcttgctgcgcgatatggaaaacaccgagcgcagcgggcaatgcaaccatggccgaccgacctggacccagatgggcctggacgatctggacaaactgttcctgcgcggccgttgatgagtgccttgccccccgcgatcttcctgatgggccccacggccgccggcaagaccgacctggccatcgaactgaccaaggtgctgccgtgcgagctgatcagtgtcgactctgccctggttttccgggacatggacatcggcaccgccaagccttcgaaagagctgctggcccagcatccacaccggctgatcgacatcatcgacccgtccgagagctattcggctgcagattttcgcaccgatgcactcgccgccatggccgacatcaccgcgcggggcaatattccgctgctggtgggcggtacgatgctctactacaaggcgttgcaggaaggcctggcggacatgccgccggccgacgcccaggtgcgcgccgagcttgaagaagaggctgcacgccttggctggcaagccctgcacgaccagttggcggcggtcgacccggtctccgccgcacgcattcaccccaacgacccccagcgcctcacccgtgccctggaagtctggcgtgtgagtgggcagaccatgactgaacaccgcctgaaacaaagtgcgcaaagtgctgacgcaggcgcttcgggacagtcacaattgccctatactgtggcgaatctggccatcgctccggcaaatcgccaggtgctgcatgaacgaattgcacaaagattcacaattatgttggaacaggggtttgtggacgaggtcgtagctctgcgttccagaggtgacctgcatccagggttaccttcgatacgtgccgtaggctatcgccaagtctgggatcatctggatggcaagctgacgtcagccgaaatgcaggaacgcggcatcattgccacgcgccaattggcgaaacgccagttcacctggttgcgcagctggagcgatttgcactggctggacagcctggacagcgacaatctgtcacgcgccttgaaatacttgggaacggtctccatattgagctgagtccttgcaattgccgtctatccttgggggtgtgacggccataagctatctattttccgattttttattattgatccttaaaggagtgcggcacatgtcaaaagggcattcgctacaagacccttacttgaatactttacgtaaagagaaagtgggggtttccatctacctggtcaacggtatcaagctgcaaggcacgatcgagtcgttcgaccagttcgtgatcctgctgaaaaacaccgtcagccagatggtctacaagcacgctatctcgacagtcgttccagttcgtccaatccgtctgcctagcgcaacgggtgatgaacagggtgacgttgaggcaggtaacgcctgataggagtctcctttgttctttgagcgccacggtggtggtgagcgagtgatcctcgttcacttggatggacaggaccctgaggcgcgcgaagatccgcaggagtttcaggagttggcaaattcggccggcgccgagaccgttgcgttttttaacgtgccgcgtcatcggccaaccgccaaattcctgattggcagcggcaaggtcgaggaactgcgcgacctggtccacgccgaagaagccgatctggtgatcttcaatcacatcctcacgcccagtcaggaacgtaacctcgaacgtgtcttcgagtgtcgcgtgatcgaccgtaccggtctgattctcgatattttcgcccagcgcgcacgtacccatgaaggcaagctccaggtcgaactggcccagcttgaccacatgagcacccggctggtccgcggctggactcaccttgagcgccagggtggcggtatcggtatgcgtggcccgggtgaaacccagctcgaaaccgaccggcgcctgctgcgggttcgcctgcgccagatcaagggccgcctcgagaaagtgcgcagtcaacgcgagcaatcgcggcggggtcgttcccgcgcggatatcccaaccgtgtccctggtgggttataccaacgccggcaaatccacactgttcaacaacgtgacgaaatcggacgtgtacgcggccgaccaactgttcgccaccctcgacccgaccctgcgccgtctggaccttgacgacctggggccgattgtcctggccgataccgtgggtttcattcgtcacttgccgcacaagctggtcgaggcatttcggtctacgctcgaagagtcgagcaattccgacttgctcctgcacgtgatcgatgcggccgaaccggatcgtatgttgcagattgaacaggtgatgctggtgctgggcgagattggcgcccaggacttgccgatcctcgaggtctataacaaactcgatttgcttgaaggcgttgagccacaaatccagcgcgatgagaacggcaagccccagcgggtctggctgtcggcgcgtgatggcagtggtctcgagttgcttgaacaagcgattgccgagttgctcggcagcgatttgttcgttggcaccttgcgcttgccccagcgttttgctcgactgcgtgcacagtttttcgagttgggcgcggtacagaaagaagaacacgacgaagaaggtgtcagcttgctggccgttcgattgccgcgctcggagctgaatcggctggtcagccgtgaaggcgtggtaccgacagagttcatcgaacaacacactttgcaataaaagcctcctaaagcggttgtgccgcagtggcaggcattctgtagcattggtcggcgcgccgtgggtgcgtctttgctttatcagatggagagcgctatggcttggaatgagccgggtggcaactcgaataatcaggatccttggggtggtaaacgccgcaataatggcgaccgcaaggggccaccagatctcgacgaggccttccgaaagctgcaggaaagcctgaatgggttgttcggtggtgggaaaaaacgtggtggtgacgacggcggtcgcacaagcaagggcggtggctatggcctgctgggcctgggtcttgtcgtgctggcggccgtttggctgtacagcgccgtttacgtagtggacgagcaggagcaggccgtggtgctgcgcttcggcaagtactacgaaactgttggcccgggcctgaacatctacttcccgccgatcgacaagaagtacatggagaacgtcacgcgtgagcgtgcctacaccaagcagggccagatgctgaccgaagacgagaacatcgtcgaagtgccgctgaccgtgcagtacaagatcagcaacctgcaggacttcgtgctgaacgtcgatcagccggaaatcagcctgcaacacgccaccgaaagtgccctgcgccacgtcgtcggttcgaccgcgatggaccaggtgctgaccgaaggtcgtgaattgatggccagcgagatcaaggaacgcctgcaacggttcctcgatacctatcgcaccggtattaccgtcacccaggtcaacgtacagagcgcagccgcaccgcgcgaagtacaggaagccttcgatgacgtgattcgtgcccgtgaagacgagcagcgttcgcgcaaccaggctgaaacctacgccaacggcgtcgtgccggaagcccgtggtcaggcccagcgcatcctcgaggatgccaacggttaccgcgacgaagtggtctcccgcgccaagggtgaggcggatcgctttaccaagctggttgccgaataccgcaaggcgccggaagtcacgcgtgagcgtctgtacctggacaccatgcaggaagtcttcagcaacaccagcaaggttctcgtgaccggcagcaagggtgggcagaacaacctgctgtacctgccgctggacaagatgatcgaaggtggtcgtagcagcaccagcgcaccgtccaccggttccaatgccgctgccaacgaagcgagcgcccgtgcggccgctgacttgctgcaacagcaaacacgtaccagggagagtcgttgatgagcaataaatcgctgaccgccctgattgtgggcgtcgtcgtggtcatcgctgcctggaactgcttctacatcgtggctcagaccgagcgtgcggtgctgctgcaattcggtcgcgtggtccaggcggatgtccagccgggcctgcatgtgaaagtcccctacgtcaaccaggtgcgcaagttcgacgcccgcctgatgaccctggatgcaccgacacagcgcttcctgaccctggaaaagaaagccgtgatggttgacgcctacgccaagtggcgcgtcaaggatgccgagcgcttctacaccgcgacctccggcctcaagcagattgccgatgagcgtttgtcgcgccgtctggaatcgggcctgcgtgaccagtttggtaagcgcaccctgcacgaggtggtttccggtgagcgtgacgcgctgatggctgacatcacgcgttcgctgaatacgatggctgaaaaagagctgggtatcgaagtggtcgatgttcgggtcaaggccatcgacctgccgaaggaagtgaaccgcagcgtgttcgagcgcatgagcaccgagcgtgagcgtgaagcccgtgagcaccgcgccaagggtaacgaactggctgaaggtatccgtgcggatgctgaccgtcagcgtcgtgtactgttggccgaagcctatcgcgagtctgaagaggcccgtggtgatggcgacgctcaagctgcggcgatctacgccaaggcttatggccaggaccaggagttctacgcgttctaccgtagcctgcgtgcctaccgtgaaagctttgcgaacaaaaccgacgtcatggtgctggacccaagtagcgatttcttccgctacctggaaaaagccaagtaatcagctcgtcactgtgtaggaagcactccgtcgggcggctaaaacgcctggcggggtgatcctttcagaaaacgggtgtatgatgcggcagccgggaaattcccggcttttttgcgtctgcatgtttgattcggcaggcgtgacaggtttttcgaggaaagtgcccgacgaggccgattgcaggccgttcgtcacgtcgctcttgcgcgtggtttatgcaggcggcgcgcattttctgcttcactcaaggctcggccgagggctggccgcccggatcaaaggggaatggcgtaatggcaacggtagaccgctggctgctgccagatggcatcgaagaagtactgccaccggaagctgcgcgcatcgaaatagcgcgtcgccaggtgttggatctgttccagagctggggttacgagtttgtcgtgaccccccatatcgagtacctggaatccctgctgaccggcgcgggccaggacctggatctgcgcaccttcaaggtcatcgacccgcagtcgggccgtcagatgggtttccgcgccgatatcacgccgcaagtggcgcgcatcgatgcgcacaccctgcgccgtgaaggcccgagccgcctgtgctacgccggcagcgtgctgcacgcacagccgcgtgccttgtcgtcttcccgtagcccgatccagttgggcgccgagctgtatggcgatgccagcccgagcagcgacgttgaagtgatcagcttgatgctggccatgctgcaactggccgacgtgccggatgtccacatggacctgggtcatgtcggtatttaccgtggcctggcccgtgcggctggtttgtccggtgaagtggaacaacagctgttcgatgccctgcaacgcaaggccatcgatgaagtgatcgccctcacggctggcgtgcctgccgatctggctgacatgctgcgtgcactggtcaacctgtgcggcggccgtgaagtgctggtggcagcccgtgagcgcctggccaatgcgccggcgccggtactggcggcactggatgacgtgctggcaattgccgagcagttgtcggcgcgcttcccggagctgccgctgtactttgatctgggtgagttgcgcggttaccactaccacaccggcgtggtgttcgcggtgtttgtaccgggtgttggccaggccatcgcccaaggcggtcgttatgacgatatcggcgccgacttcggtcgtgcgcgtccggccaccggtttttccaccgatttgaaaaccctggtgaccctggggcgtgctgaggtcgagctgccgtctggtggcatctggatgcccgacagtacggacgcagcactctggcagcaggtttgccagttgcgcagtgagggtcagcgtgttgtccaggccctgcctggccagccattggccgccgcccgtgaagcggactgcgaccggcaattgattctgcagaacgggctttggcaagtatcgccactggcttcttgagttttcctgccggccatcgccggcaccaagtttgcgcgaatgaggacaagtgttatgggtaagaatgtcgtagtcctgggcacccaatggggtgatgagggcaaaggcaagatcgttgatctgctgaccgaacatgctgccgccgtagtgcgctaccaaggtggccacaacgctggccacaccctggtcatcgatggcgaaaaaaccgttttgcacctgatcccgtcgggcgtactgcgcgaaggcgtgcagtgcctgatcggcaacggcgtagtggttgcaccggacgccctgctgcgtgagatcaccaagctggaagaaaaaggcgtacccgtgcgcgagcgcctgcgtatcagcccgtcttgcccgctgatcctgtccttccacgttgcgctggaccaggcccgtgaaaaggcccgtggcgagctgaagatcggtactaccggtcgcggcatcggcccggcgtacgaagacaaggttgcacgtcgtggcctgcgtgtgggcgacctgctcaacatgccgcgctttgaagacaagctgcgtgaactggtggattaccacaacttcatgctggtcggttactacaaagagccagccatcgagttcgagaaaaccctggccgagtgcaaggaatacgcagagctgctcaagccactcatgctcgacgtaaccgccgagctgcacgacctgcgtcgcgctggcaaagacatcatgttcgaaggcgcacaaggctccctgctggacatcgaccacggtacctacccgtacgtgaccagctccaacaccaccgcaggtggcgttgcgaccggttccggcgttggcccgatgttcctggactacatcctgggcatcaccaaggcttacaccactcgcgtaggttcgggcccgttcccgactgagctgttcgacgacgtcggcgctcacctggccaagcaaggtcacgaattcggcgcgaccaccggccgtgctcgtcgttgtggctggttcgacgccgttatcctgcgtcgcgctatcgatgtgaacagcatctcgggcatctgcctgaccaagctggacgtcctcgacggtctggaaaccatcaacatctgcatcggctataaagatgccgaaggcaaggacgttgctccgaccgacgccgacagctacgtgggcctgcagcctgtgtacgaagaagtgccgggctggaccgaatcgaccgtgggcgccaagaccctggaagagctgccggttaacgcccgtgcctacatcaaacgtgtcgaagagctgatcggtgcgccgattgacattatttcgacaggtccggaccgcaacgaaaccattgttctgcgtcatccgttcgcttaataagctgttgatgtaaaaagcaaagggctccttcgggagccctttgtcgtttctgtcgcctgggcggcacgacccttgctttggttctttctttcgcggtgctatcaaattaatggcacccgtggtggagggattcccgatgtctgccgttctctcattgttacaaagccgtctgttgcggccagtgttcgttaccctaggtatcgctcttttggtgcaagtgctggtggcggtcgccctgacgcgaagcacggtcactgcactggaggcagatctgggcaatcgcctgggtgtcgacagccagaagctgtccggcgaattggcccaggctggcaaggaagtcacgtccagtctcgatagcttgtctacgagcacccgtcagcgtctaaccgcagggctctcgacccgcctgcaggaagagcagaagcaactgcgtgcgaccctggaaaaagacctgaaagactctgccaatgacatggcgcaactgctggcctcggtggcgccccgcgccatgtgggacagcgacgtgccgacgctgtcggagttcgcccggcgcgcccagcgcaatcccaacgtgctgttcgtggtctatgacgacgcggcgggcgagcacctgacgcgctacctgaaccgtgaaaacccgatcaaccaggcgttgttggacaagggcaagggtgatcgtgccctggataaagtgttggatgcggccaaagatgatccttcggtgttctacgtggaggcgtccatcagccccaatggcgtagagatcggcaaggtgcgcatgggggtttcgacggctgcggttgaggctgacctgcaagcgctcgataaacgttttgcggcgctgatcgccagcggggatcaactggtcggcgatagcctcaagggcgcggcggccgacagcgctgccgccatgggcgcccgcttgcaatctgcgcaagccacggccacccagatgacggccaataccacgagcgccgttcaggacgctgctggcaccctgcgctggcgtatcggcatggggctcgcgctggtcggtcttggcgtattgctgttgatcgctgtggtgctgggtcgccgtgtggtcaaccgcttgaagctgctgatcgcggccatggacgatttggcggcgggcgagggtgatctcaccaagcgcgtgcagatcagcagcaaagatgaaatcggcgacatggcttcggcggtcaatcgctttgtggataagttgcagcccatcgtgcgtgaggcgggggatgtggcccagcgtaccggtgtggaaattggtgccatgaccctgcgcaacgcaggtgccgatgcggccgccggcttgcagcgcgatgaagtggccgagagcttgcgcgcactgtcgcaaatggccgatgaggcgcaggccgaaagtcatgcgatgcaggcggcgttgcagcaggtggtggatatccgtcaggccacggacgagaactcgcgcacctcggctgaagtcggcagtttgatcgaggcgctggcggggcaagtccaggccggttccacggtcatcgagcgcctggcccagcaaagcgagcagatcgaggtggtgttgactgtcattcacggcattgccgagcaaaccaacctgttggcactcaacgcggcgatcgaagcggcgcgtgccggcgagaccgggcgcggcttcgcggtggtggcagacgaagtacgggcactggcgagcaagacccaaagctccaccggcgatatccaggcgcatatcgtggcgttgcagcaaggcgcgcgggaggcggtggaaaccatcggcaaggctgggcgtcaggcgaatgagggcttgctggtgctgcgtgacagcgtgcgcttgcagcagacggtgcaggcctcggtggagcaggtgcatgccgcgattggtttggcgacgcgtgcagccgagcaccaggcccagggcgcccatgcggtgcgcggccgggtcgaggtgatccacgcccaggccgagcgtgctgctcaggcggtggtggagactaccgccagtggcaaggtgctggatgggttggcggcgcagttgaaggcgagcctggggcagttcagggcctaggtggatagccagatggacgggcaggctaattagtcttgaatttggctacatactcattcaaatgttctccagggaagcatattggcgctggggggcatcgtctcagtattatggggttagcgatgctgcgatggtgccaatgcgccttttttcaatagttttgccgcaactcgaaaaaggtcgggcatatctaagcgaccgtcattccgccgatacattacacctatctcttcaagcatcttcgagagttcttcctccttatgtgcctcttggtttttaaagggcagaaggtagctgtgacgttttgcgtctgcaactaatgtctttatagttcctgcctttctccatacgtcaaatactgcatgatcatcttgcggcaagagtaggcctgctagaggcgctaggacccccttgatccatgggaattcttgatgcagttggtcgacacgtgtcttagaggcttcacggaggccatgtctgatgccatcaggagttaaaaccttgtctaggggcgcaacaccatatttcgctgccgcattcatcagtcccaggaagcttcttggtgtaacttccgcatgggcgtcagcagtatgtctcaacggccattcgtaggtgctgccttttttgaatgcatagctaccagttcccatatatgggccggagaattcaatcatcaagttcttctgatcttcctcgtcatggatcagagaccaccgccgagtcaagatggatttcctgctgggtttaggtagattattagctgtcagtagcttgttaaacgctttacgagtgtcttccttacttgatgaggctagtcgcgaatacagaaggccatagaggtctgtccaagaccacgccaagcggactgccccagttcggagtttcggaagttctacgaatcgtagtgcatcatcctcaatctggtcaggacgtaaaaaaagtttgacgcgaatagagcggtaggcgcgcatagcccataccacttccaaaagggcctctgtcagcagccgtcgccgcggccatgtgcgtgctacggtatcgagcgcgtcatagacaatcagtaaagtttttccttcgtcacgaagccggtgctcatgatcaatgagcagatcttctcgaagctcccaatccattccagcactgataaatttccccggtctgctactaagctttcctgctgactgagccgctgcacttaaaatagttgcccaccaaaaagctttagcttcatcgagcgcagcggtagcaggtacatatttatcaatcgcttcatgagatatgccatcagggcctccgacgccagtgtatccaaaccgaacaatcagttcagagaggcctagcttgggataagcaatagctgcttccttcagtgtttcagtctgaccaagaacacttgaccaaaaacttttgccgctgccgcgcgatcccacaacaattggaatcattggatccagcgcaacagcgtgtttttctggtgcatagaggtcctcaatttttgccacatgggcgccaaccgcatcattagatacgtcgcctgggaattgagcgacggcgttacgaagtgctcgaaagtcgtcttgggaaagattcatttttattccaggagctgagggatgctattgtttatcttgtctagtagttcctgataggaggagctgtagatgctgttttcgattaggtcgcgttttattaaaggattgaagcttttgtatcgtgagtcgtcgatgattgctaaaggggtgaaataattagggtcttcagctggtagcacatctgcgtcggaaatctcatcgtcccactccaactgatcaaagtcgctgatctcatggttgatctcgttaattgggcttttctggtgaggccctagtccgatagtagtaaacaagctttcgcaacgttctgcaaagtctttgcgaagctccgattctgcgggagctttgccttggataattgtgaatcggcttagccagccaggcaattgctcggcgttagtgaacttagccatatgggatagtagaattctaaagccttgaaaggtttgtggctcatctagtccgaaaaggaatacttccgcccctaaacctaataacgcagaagcagtggtttcgtgaaggccggcacgagcatcgaccaggataacgtcataccgacgcggatcagaaaactggtcgattagtgatgaaatttggtcaagaaccgtaattacttgtccttcgggggtaatgtcctcggcgtaagcccgagcaatttttgctaggacttcagacggattatttattgagcgccgacccaagacaggtataacgtctattcggccgttattaccagtcaatggtgacgggctgactaagtcggccaagaaagtttcgtccagtgctgtaagtccattttcaactaaggcatctagcaagccaaactcagggagcgtgtcatcgttcagaagaatagcgccgagccctggagcctcaatgtccaaatctatagctaaaacttttaagccgcgagcagccaaatccgccgctacaactgcaagcgctgtcgatcgcccaactccgcctttaatgcttgaaaagacgaagcgcggtggcgctgagttaggtggggctggggcgcgtagccaatccgctccaaccagacgtctatctattaggcgaattttccgcccttctatgataagggaagttatcgtgttttcgattaataaatcactgactccatattccgaaatgtcagctaccagttgatcgtctcgggcgtagtgcttaagggacgaccgcagtgatgtcgatagttgctcgatagtcgctggagacaaaatcgagttactaaaaaatgccaatctgccggtggtgtcgcgtaatacgacaccgtcagaaagtgcctcatctccaagctgtctagccactgttgtggcaagtattctaaggctgtcatcgaagtgaacgcgcatcaataaatcctcaggtaccaatagagccaattacgctaacggcctgcgctttccactgatccaacagtctggttgggatttggtttcctttgctgtagcgcatcgttatatcccaatctgaaaaaaagttgtcgttcagaacgtgtctgcgtaaaacagtggcatttctgccttcaagcttgtttctgagtagcgttttcagcgttggaaagtgtgcgaaaaaggggtcattttcacggctcgcgagtggcctgaacccgatttcaagcatcaatgcctttactccgcattcggcagcaattccgtacaagtaaccagcaacatctctgcggttagtagggtctagaatgtcagctgcttccagatgtcgtctcgctgctgctctcatgtctggggcgtaaggcatctatctctaaccttcaaaaaatgaaggaacaatagtcgttcggatggctgaaatccattgtaatttgttactagggaatatgcgcgtttgagggcttagcgactcaggtacatccgggttgtcagcagataaaccggcaaccccgacaccaaaatcaacagcgccgcataaggcgccgccgccgcgaactccacgttcgaggtatgcgcccaaacggctgtggccagggtattcaacccggtcgggctcagcagcaaggtagccgtcaattccttcatcgcatccaggaataccagcgcaaacgcagcacccaatgccgggaagataatcggcaaggtcacccggcaaaacgcgctgaacgacgacgcgcctagagtccgtgccgcctcttccaattgcggcgccgccttgttcagcgccgtacgaatcggtgcctgggccagcggcaaaaacaaaagcgcataagcaatcagcaacaacgccgaggtctggtacagcgctggcacgtaatgcagggcgaaatacaccagactcagtgcgatcaccaggccgggcaaggcgtgcagcaagtaaggcaggcgctcggcccagatcgccagttggcctttgtagcgcaccaccagcagtccgaccggcaccgccagcaccaggcaaagcgcggcgccgccgagcgacagcgccagggaggacagcaacgcctcactgatctcggccagcggaaatgcagccgacgaacctactgccagccaataaccgagcatccccaggggaatgccgctgccgatgatcgccagcgccaggcaatacacctggctcagtggcgcccacttacccaatcgaacctgctccgcatgtcgcgctgcgccctggccaatgcgcacgtgccggcccttgccgcgcacgcgcagctccagccatagcagcgtcaggcacatcaccagcagcaccgccgagagcatcgcggcattcgcattgctgaattccagctcgaactgttggtagatcgcggtggtgaaggtctgcaacccaatgattgacagcgcaccgaactccaccagcatgtgcagcgcgatcagcaatgctccagccagcagcgagggccacaacaacggcaaagtcacgcgaaagaagatgccccagcggttcagtcccagggtacgggccgactcttccagtgcgggatcaagattgcgcagcgttgccgccaccggcaagaacaccagcgggtacttcgacaggctcatcaccaggatcgccccgccgagcccttcgaaactggcgctcaacgacacccaggtaaagctgctgacaaacgccggcaccgcaaacggcaggcacaggatcacaccccagatgcgccgccccggcaggttgctgcgctccagcaaccaagccagggacaggccgatcacgccgcacgctaccgttaccccgaccatcagcgccagggtgttgcgcagtaacccaaacacatacggtcgccacagcagatgcaccgcctccgcccagcccgcttgccaggccttggtgccgacgtacgccagcggcagtaggctcaagccaaccagaaatagcaccggtagcaacagccagatcgacgggcgcttgcgccgcgggctgaaccctgtgcgcagggcgggtagcgatgggttcatcagttcaagccaacgtcacgttccaggtccagggcttcttcggcgttgcccaggtcggccggggtgactttcggcggttgcagttcgctgaaaggcttgagaccgcgattggattccatacccttgcgcagcgggtattcggccgaggtattggtgatcacgcgctggccttcttcactggccatgaatgccaacaattgctgggcttccttggggtgcttgctggatttcagcgcggcggcggaagacacggtgatcaggccaccggcgtcgccattggtgaagtagtgcagttgggaatccagattggtcttttctttcttcagggcgaaccagtagtagttgttcaccagaacggtggccacttcgccgttttcgacggctttcagcgcaaccatgttgttgctgtacaccttgccgaaggcgcgcaggccggtcagccattcttcggcggcttcacgaccgtgcagcttgatgatcgccacagcctgttcctggaacgcgccgctggtcggcacgaagccgaccttgccttgccactcggggccggcaaagtcgagtaccgatttgggtaggtctttttcggcgatcagtttcgggttgaacgccacgacacgggtgcgtgcggttacgcccatccagtcgccatgggcgccaacataatccttgggcaatacgtcgagggtgctggcgtcgatcttggccagcaggccttgctcgccgagtttgttcagcggcggcgattcttcggtgtagatcacgtcggcaggggagcggtcgccttcttcgacgacctggctggccagctggttgctgctgcctttgcgcacgttgacgtggatgccggtcttggcttcgaaggccttggcgagctcgtcgccgacttctttgtgctggccgttgtacagggtcagggagaccttgtcggcggagtaggcggtgggggagagcaaggtcaggccgagcagagtgagggtcaggccacgcagaagggatgtcttgagacgggtatcgcggatggtcatccgaagttttcctcgcttgtgtgcaacaaatcattgcaaggataaacgataaagtttctcaggtgcggatgcaggtggaaatcgacagggaagttttcaaaccccggaaacgaaaaaacccgctttcgcgggtttaatctgaatttggtgcccaggagaagactcgaacttccacgaccttgcgatcaccagcacctgaagctggcgtgtctaccaatttcaccacctgggcattatcaacaacgcttgcgctgttgatggagcgaactatacggagggctttttgatctgtaaacccctgattcaaaaaaataaatcaagttttccgttaaaaatcaaagccttgaaacgaaaaaacccgctttcgcgggtttgatctgaatttggtgcccaggagaagactcgaacttccacgaccgtaaggtcaccagcacctgaagctggcgtgtctaccaatttcaccacctgggcattatcaaacaacgttgccgtcgtcgatggcgcgcactatacggaggggattttaagctgtaaacccccgccacgaaaaaagcctggaaaatttcgccagtggtcgtgcaaggtgcccgttgcgggctgcaaagggctttaaaaggcttgttgacgtctgaaatttcccgtttcaatacgcgtatgccaaactaacccgcatatagacaaggtgaaaactctctaatggccgattggcagtccctcgatcccgaggccgctcgtgaagcggaaaaatatgaaaaccctattcctagccgcgaactgatcctggcgcatctcgccgatcggggttcgcctgctagccgcgagcagttggtcgaagaattcggtctgaccaccgaagaccaactcgaagccctgcgccgccgcctgcgcgccatggagcgcgacgcacaactgatctacacccgccgtggcacttacgcgcctgtggacaagctcgacctgatcctcggtcgcatcgccggtcaccgtgacggcttcggctttctgatcccggacgacggcagcgacgatctgttcatgagcccggcgcaaatgcgcctggtgttcgatggcgaccgtgccctggcgcgcgtttccggtctcgaccgtcgcggtcgccgcgaaggcgtgatcgtcgaagtggtgtcccgtggtcacgagaccatcgttggtcgctacttcgaagaaggcggcatcggttttgtcgtgccggacaaccccaaggtgcagcaggaagtgctgatcaccccgggccgcaacgccaacgccaagatcggccagttcgtcgaggtgaagatcacccactggccgacgccgcgcttccagccgcagggcgatgtgattgaagtggtcggcaactacatggcgccgggcatggaaatcgatgtcgcgctgcgcacctacgatattcctcacgtctggcctgaagccgtcgtgaaagaagcgcgcaagctcaagccggaagtcgaagagaaggacaaagagaagcgcatcgacctgcgcgatctgccgttcgtcaccatcgacggcgaagacgcccgcgacttcgacgatgcggtctactgcgaggccaagccaggcaagctgcgcctgttctccggcggctggaagctgtacgtggcgattgccgacgtctccagctatgtgaagatcggttcggccctggatgccgaggcgcaggtgcgtggcaactcggtgtacttccccgaacgcgtgattccgatgctgcccgaggagttgtccaacggcctgtgctcgctgaacccgaaagtcgaccgtttggccatggtgtgcgagatgactatctcgaaaaccggcgaaatgacggactaccagttctatgaagcggtgatccactcccaggcgcgcctgacctacaacaaggtcagcaccatcctggagcagccgaaaaccagcgaagccaaagccttgcgcggcgagtacggccatgtcgtgccgcacctcaagcagctctatgcgctgtacaaggtattgctgggcgcacgtcatacccgtggcgcgatcgattttgaaacccaggaaacccggattgtcttcggttccgagcgcaagatcgccgcgatcaccccgaccacccgtaacgatgcgcacaagctgatcgaggaatgcatgctggcggccaacgtggccaccgctgaattcctgaagaagcacgagatccctgcgttgtaccgcgtgcacgacggcccgccgccggagcgcctggaaaaactgcgcgcgttcctcggtgaactcggcctgtccctgcacaaaggcaaggacggcccgacgccgaaggattatcaggctctgctggccagcatcaaggatcgtccggattaccacgtgatccagaccgtgatgctgcgctccctgagccaggcggtgtacagcgccgacaaccagggccacttcggcctgaattacgaggcgtacacccacttcacctcgccgatccgtcgttacccggacctgctcacgcaccgcgccatccgcagcgtgatccactccaaacagaacactccgcacgtcaagcgcgccggtgccatgactattccgaaggcacggatctatccgtacgacgaagcggccctggaacagctgggcgagcagtgctccatgagcgagcgccgcgccgacgaagctacccgcgacgtagtgaactggctcaagtgcgagttcatgaaggatcgcgtaggcgaatcgttcccgggtgtgatcacggccgtgaccggctttggtctgtttgtggagctgaccgatatctacgtcgagggcctggtgcacgtcaccgccttgccgggcgactactaccactttgaccctgtgcaccaccgcctggcgggcgagcgtagcggtcgcagcttccgtctgggcgataccgtggaagtgcaggtcatgcgcgtcgatctcgacgagcgcaagatcgacttcggcatgcccgacaagcccgcagaagcgccgggcagccgtaaaaaacgtggcagtgaaaccacggctcccgccagcaaaggcaagggtgctccagctaaggtggctgcagagccagcgcctgccaaggccggtcgccgctcatcgaccaaggaaaaggcccccgaagcctaccgcccaagcgacgcagcggcgaaaaacgccgaactgcgcaagagtcgtgagttgaagcagcagttgctcaacgaagccaaaagcggtggtaaagcggcgtctgggggaaagtcccacggggcggaaaagccgtcgagcaagcccagtaaacaccgtaaaggcccgccaaaagcgggttcggctcccgcgaaaagcggcggctcgcgcaaacctaaggccaagtcatgagtctggaaaaaatctacggcgtccacgccgtggaagcactgctgcgtcaccaccccaagcgcgtcaagcaagtctggctggcggaaggccgcagcgagccgcgcgtacaagcgctggttgaactggccacgcaaaacaaggttgccatcggccaggccgagcgtcgtgaaatggacgtgtgggtagagggcgttcaccagggcgtggtggcggatgtcagcccaagccaggtgtggggcgaggcgatgctcgacgagctgctcgaccgcaccgaaggtgcaccgttgctattggtgctcgacggcgtgaccgacccgcacaacctcggcgcctgcctgcgttcggcggacgctgccggtgcgctggcggtgattgtgcccaaagacaagtcggcgaccctgacgccggtggtgcgtaaggtcgcgtgtggcgcggccgaagtgattccgctggtggccgtgaccaacctggcacgcaccctggagaaactccagcagcgtggcctgtgggtcgtgggtacggcgggggaggccgaggtcagcatttatgaccaggaccttaccggcccgaccatcctgatcatgggcgccgaaggtaaaggcatgcgtcgcctgacccgtgagcactgcgattacctggtgcacctgccgatggccggtagcgtcagcagcctcaacgtgtcggtggctaccggcgtttgcctgttcgaagcccagcgccagcgtggcgcgaaggccaaggccaaaccgaagaagtaatcaaaatgtgggagggggcttgcccccgatagcggtgtgtcagttgcagatgatgtggctgatcctccgtaatcgggggcaagccccctcccacagtcgttttggggtgcttggaagattgttcaaataatcaccaatcaccttgcgcgcatcctcccccttctctacaattgcgccccttgccttcctggcgggcaccgatgtgcctccctgcggcaagatccataagtgtcattcactccttgtctgaccgtttttgagcggcaggctacaacccgtaaggagcattcatgcgtcattacgaaatcatctttttggtccacccggatcaaagcgagcaagtcggcggcatggttgagcgttacaccaagctgatcgaagaagacggcggcaaaatccaccgtctggaagattggggccgtcgtcaactggcctacgcaatcaacaatgttcacaaggctcactacgtgatgctgaacgttgagtgcactggcaaggccctggccgagctggaagacaacttccgctacaacgatgcagtgatccgtaacctggtcatccgtcgcgaagaagccgttaccggccaatccgagatgctcaaggctgaagaaaaccgcagtgagcgccgtgagcgtcgcgaccgtcctgagcacgaaggcgctgatagcgttgatagtgatgacagcgacaacagcgataacgctgacgagtaatccacggaccttttaaggagcctatcaaatggcacgtttcttccgtcgtcgtaaattctgccgcttcaccgctgaagacgtgaaagagatcgattacaaagatctcaacactctgaaagcctacgtatccgagaccggcaaaatcgttccaagccgtatcaccggtaccaaagcacgttatcagcgtcagctggccaccgctatcaagcgcgcccgcttcctggccctgctggcctacaccgacagccacggccgctgagaccgggcagtcgacaagtagtaagggattgaatgcatgcgcgccttagctgagttcatcatgcgcggtcgcgtgcaggccactctggtagtggctggatgtgcagcattgccgttgttgtattggttgggtgctgccgcaggttgccttgtgctgctgcggcgcggtttgcaggatgcccttggcgtcctggccctgggagtgctggccgccttgatctggtggctgcaactgggcgaacccaaggtacttctggtgttgctggggtcgtcgagccttgcgttggttttgcgcgcaagtgagtcctgggcccgcacgctgctggtcagcgtggcagtggggttggtgttttcggtgttgatcgacgcggctttccgcccgcagatcgaggcgctgtcgcaagagatcgtcaagatcctgccgatggccctcggggaactctaccagcagctttcggtagatgagcgagcgcgtcttgcgacactgattgcaccggccctgatcggcctgatggcggtaatgatgcagatcgtcagcgtgctgagcctgatgcttgggcgttattggcaggcgttgttgtacaacccgggtggttttggtcgcgagtttcgcagtatcagaatccccgtgggcccggcgatgttgctgctggcactcatggtggtcggaccgtacttcggttcacaagccaccttgctggtgctgttttgcagcgtaccgctggtgttcgccggactggccctgattcacgggctggtcgcgcagaagcgcctggccaagttctggctggtggggatgtacgtaacaatggtgctgttcatgcagctgatctatccgttactcgtggttctggccattgtcgacggcctgattgattttcgcggtcgtctggcgccgaaagacgccgataacgcgaacggtgaaggttaaaagttagaggattttcacatgcaactgatccttctggaaaaagtcgccaacctgggcaacctgggcgacaaagtgaacgttaaggccggctacggtcgtaactacctgctgccatacggcaaagccaccgctgcaaccgctgccaacctggctgcgtttgaagagcgtcgtgccgagctggaaaaagccgcagcagacaaaaaagcttcggccgaaactcgcgctgcccaactggctgagctggaagtgactatcactgccaccgccggtgacgaaggcaagctgttcggttcgatcggcacccacgacatcgctgatgcactgaccgcctccggcgttgaagtgcagaagagcgaagttcgtctgccgaacggcaccatccgcaacgtaggcgaattcgacgtagccgtgcacctgcacgccgaagttgaagccaccgtacgcgttgtcgtggtagcagcttaagccgcacctaactgactggcacctcgcgtgccaggcggttaacatcgggcacgatcctgtttacaggtcgtgccttttgtttttctacacacccccaaattccaagtggccatgaacgatatttcagctcctgagcaatacgatctgcaaaccgctgccctgaaagtgccgccgcattccatcgaggccgaacaggccgtgctcggtggtttgatgctggacaacaacgcctgggagcgcgtgctggatcaagtctcggacggtgatttctatcgccatgaccaccgcctgatcttccgtgccattgccaagctggccgaccagaactcgccgatcgacgtggtgaccctggccgagcaattggacaaggaaggccagacctcacaagtcggcggcctgggctacctgggcgaactggcaaaaaacacgccgtccgtcgccaacatcaaggcctatgcccagatcgttcgccagcgcgccacgttgcgccaactgatcggcatcagcaccgagatcgccgacagcgccttcaaccccgaagggcgcaccgccgaagagatcctcgacgaagccgagcgccagatcttccagatcgccgaggcccgcccgaaaaccggtggcccggtgggcgtcaacgagctgttgaccaaggccatcgaccgcatcgacaccctgttcaacaccgacgccgccatcactggtatttccaccggttatgccgacctcgacgagaagaccagcggcctgcagccgtccgacttgatcatcgtcgccggtcgtccgtcgatgggtaagaccaccttcgcgatgaacctggtggaaaacgccgtgttgcgcagcgacaagaccgtgctggtgtactccctggagatgcccggcgaatcgctgatcatgcggatgctctcgtcgctcgggcgtatcgaccagaccaaggtgcgttccggccaactggaagacgacgattggccgcgcctgacctcggcggtcaacctgctcaacgaccgcaagctgttcatcgatgacactgcgggcatcagcccatccgagatgcgcgcccgtacccgccgcctggtgcgtgaacacggcgacatcgccctgatcatgatcgactacctgcagttgatgcagatccccggttccagcggcgacagccggaccaacgagatttccgaaatctcccggtccttgaaagctctggccaaggaattcaactgcccggtggtggcgctgtcccagctcaaccgttccctggaacaacgccccaacaagcgcccggtgaactccgacttgcgcgaatccggcgcgatcgagcaggacgccgacgtgatcatgttcgtgtatcgcgacgaggtgtaccaccccgagaccgagcacaagggcattgccgagatcatcatcggcaagcagcggaacggcccgatcggctttatccgcctggcgttcatcggtaagtacacacgcttcgagaacctcgcgccgggcagttataacttcgacgacgacgagtaaaacccaggctcaagggcgcgtctcggggagcgggccgaacaacgcgcggatggtcggttcgttgtactggtagttccagcgcagctcggtgccggcgcaaatatcctcacgggtaaagaatgctgttagcctcagtgattcccgaggttgctcgcctttctgggtctccacattgaaatacactgcttcgacgttgtagccaccgcttgcctggcgcaccgggtaaccggcttcgtagtcaaagatagtgttcatgcgcgacagcacgttatcgcctgagagcacgacttcgcggttgatggggctcgcggtcgtctcgtgtggaatctgataggggcgcacgtcgatcaggtacgggtcccggcgaaacccggcgatgtgatggggcagtaaaccgccgccgtatactcccagcacttctcccttcgtcaagtctttcgtgctcaccacgcacgactgtcctatcaataccgactcttcggcgaagcggcactgggcttgagtaaagggcaccacttcgattttttcgtcatacaactgcgcaaccttttcataaccttcccactggatgtacggcagtaccggctgcttgtcgaacagcgcaccgctcgttggggatttgccctggctttgcatggctttgatgcgcatcggttggccgtccacatcgcgtaggggatagcggccattgttggcgcggtcgtagaggcctcggtaattctgactgaactggtacgaggcgtgggagcgcatactgcgcagctcgctgggcccgtatggatgaggtgggttggggaggggcgacggtagactttccagcgctgactcatagtcgacgttcgagtcggccgattcgaacagctcgctggacgtggagccggagcgcctcctggggggtgtcggcatcccgcccagtagtgcatccttctgcggatcaatctgccagccgccctctgcgttcttgccgatatacggttggtaggccctgaagcggctgcgggcgtcaagcaaacgccaccccagcgcgtcggctttgaccagatagtagttgccggactccagcacgtaatagcggtagctgccatccggcaggggcggggcttggtagacgccgtctgcgcgcaaggtcagcccttcggggggcgtcgggctggcgaaaagcgggtcgaaaggcagccccggtacagcaggggagtctgcccacggtgttggcgcacgtttgggcggcgcgggtttggccagcagttcgaggctggccttgcgcaaggcgctgggcaggtccgcaactcccgactggcgcagcacgtgactgcgctcgcggtctgaaaggctttgatcgatagccgtgagcaggtcggctggtgcgcccagcgcttggccttgagcggtatggcaagtgaactgctctcgttcatgcaccagcaagtgcccggtgtcgttttcgccggctccgttgctatagagcaaggggccggtgagcgtttgctcgcggatctccagtcgactggatgttggccagccgggcaaagactccagtgctgtcagcaccagcacagggtagtcggggctgcgggttgtcttcaggtagaggctttcgtaggcacgatggacgctggattggttcaggtattggccgaattcccaatgctgttgcgcggtgagggagcgttccagctgtaatcgctgctgatctgcgaagctcagcccgcaggtcgcctcttccagatgatatttcgataggccgggcaggatgtcacggatcgtctgctccagcgcagacgcgggttgttcggcgcggtcgttgagccaggtaaacacgcggtctgcgtgctcatgggcctcggccgccagggtgaatgcgaggttttcgacgttgctggagcgtccgacccgtctggcgggcagttcattgaactgcgcttgggtcagttgttcttccaggcagtccagcaactcgcctttgcgaaagcgtgcttcagggactgtgatttccagcccctggttgccgtggctgaacaggacccgttgctgttcatcgaccaccttcagcacgcggttcgtcggccattttggcaaggataccagcaggtgaaactggataagtggagagtgtcgactcacttcgctgccttcggcacgggcgaagttgaagtcttcgatttcctgcgccaggttgaagcgcctgactgtgtcgcgcaggcccggcggcgggcgtacgacttcctgatgcgcctggcgcagcaggctggcgtcggcaccactgacccgcaggatcggctccaccgctgatgccttgatgtttgacgcatcagggcccagccgcttgatcagtttgaagtcgtcccaatcgcgggcggtttcgtgttcctggcgccacccgccgacgtcattgctgagcatctgcggctgataggcgcgcgggtcgctggggtgttgcaggcgccattgcgaggtgcgcgggtcgcgggccagggcgtgcaggtggtcatcgagagacacgtaatgctgcccctcgtagtgctgcagcccctgggcgtcgaccggcacctgcgctggcagtgtcttgagttggcggtacggcaccatgtccgggttccacaggcgcatgccctgttcctgcaccttgaccgcgatcaaccgcgcgccgaaccctccggctttcaccgcgcctgcggtagcgacgccctgggcgacggtgtccaccacgtccatcatgtcattcagggcctggtcgctgtcccctcggctccaggcggcaaacccgttgtaaaggctgtcgaccagctgtgcggctgttaccaccagcagcacttcgcccacgatgggaatgaatgacgccgcgaagaacagtagcgacttaccggtctcggcaaagtaatgcaggcgtttctgccggctcagggcgtcggcatctgccgttggcaccgccagggtgcgggcgtcgtcgcggatctgttggatacgttgtatggcgaccgcctggaacgcgtcgccctggatcagggtacggctgactttggcttcaaggcgggccgcaatcaccctggcgggagagtcgatgcgtggcgcgacggtcctggcgggcagcaccgtgagcagcgtgccctggtgtcgaagcggtaccagtcgctggaaaaaaccgaagtaggcgggctgggccaggcgttgtaccagcgagtgttccagggactccattgactcatgcttgcggaacgagccgacgggatcgtcgggtatatagagcagttgctgtcgatccacttgcgtatcgtggatgaccagcacgctcggcagcaccacgccgcccagggtcaggtggttgcattgcaggtcgggatggccgccattgcgggccagggccagtagagtgctgtacagtctttgatcaatccagcccctcaaatgagcgatatgcgaggcggtttcaaaccgagtctgttcacttcgggaaaaaagctggcgtacctgcacggctgcctggggtgtgtccttgggcgcaagcagcgtctcaaggtgttggaggtaatgcttgcccaggtcgaggctgcgacagaaaccggcgaacatgatcggtgagatgggctgccgggttatcgcggcgccatacacgttgtaaatggccgatccggcttccatcccgccatcctcggcttcgcccgcttcaaagttctgcagtgcggcttccaacaggggttgttgggtggtcctggcgtgggtcttgatcaggcccagcaggtgatggtttttccattcgcgcaacacaaccccacgctcactgtcgagcaggccgaagaaggtgctctggagcgcgctttcgaaatacggccgggcgtactccgaagggcttttgagctggctgagcagcgccttgaggttgtgccgggcctggttgttgtcgaccaggctgcggcgcaagtcatcccgcagcgtcttgtttgcccgggtgagccagggaggcaggtttttctgaatgaactcagcgtgggcctgcagcacggggggcttggccgtttttggcgtcagggcgctcatggcgggtcctagggtgggttggtttgccacaggttacccacgaagatttcccggaatggctagccgggtagtgcgcggcaatgggcgaaaccctatagcgactcggcctggaatgacggtgtggcaaaagccgaccattgccgtcggaattggtcaaaatttgtgctatattccgcgcccgcgattttccatctcaacaccggtcaccgtcatgcaaacagccaagccgttatttgactatcccaagtactgggccgaatgtttcggtccagcgccattcctgccgatgagcagggaggagatggatcagcttggctgggattcctgcgacatcatcatcgtcaccggtgatgcctacgttgaccatccgtcgttcggcatggcgatcatcggccggctgctggagtcccagggcttccgcgtcgggatcattgcgcagccgaactggcaatccaaagacgacttcatgaagctcggcgagccgaacctgttcttcggcgtcgcggccggcaacatggactcgatgatcaaccgctacaccgccgacaagaaaatccgctccgacgacgcctacaccccaggcggcatggccggcaaacgcccggaccgcgccagcctggtgtacagccagcgctgcaaggaagcctacaagaacgtgccgatcgtactcggcggcatcgaagcctccctgcgtcgcatcgcccactacgactactggcaggaccgggtgcgcaactcgatcctgatcgacgccaccgccgatatcctgctgtatggcaacgccgagcgcgccatcgtcgaagtcgcccagcgcctgtcgtggggccacaagatcgaagacatcaccgatgtgcgcggcaccgcgttcatccgtcgtgacacgccggccggctggtacgaagtggactccacgcgtatcgaccgtccgggcaagatcgacaagatcatcaacccgtacgtgaacacccaggacacccaggcctgcgccatcgagcaggaaaaaggcccggttgaagacccggaagaagccaaggtcgtgcagatcctggccagcccgaaaatgacccgcgacaagaccgtgatccgcctgccatcggtggagaaagtccgtggcgacgcagtgctctatgcccatgccaaccgcgtgttgcacctggaaaccaacccaggcaacgcccgcgccctggtgcagaagcatggtgaagtggacgtgtggttcaacccgccacccattccgatgaccaccgaagaaatggactacgtgttcggcatgccgtacgcccgcgtcccgcacccggcttacggcaaggaaaaaatcccggcctacgacatgatccgcttctcggtgaacatcatgcgtggctgcttcggcggctgcaccttctgctcgatcaccgagcacgaaggccgcatcatccagaaccgttccgaagagtcgatcatccgcgagatcgaagagatccgcgacaaggtgccgggctttaccggcgtgatctccgacctcggcggcccgaccgcgaacatgtaccgcatcgcctgcaagagcccggagatcgaatccgcgtgccgcaagccatcgtgcgtgttccccggtatctgcccgaacctcaacaccgaccactcgtcgttgatccagctgtaccgcagcgcccgtgcgttgccgggtgtgaagaagatcctgatcgcctccggcctgcgctacgacctggccgtcgagtcgccggaatacgtgaaagagctggtcacccaccacgtcggtggctacctcaagatcgccccggaacacaccgaggaaggtccgctcaaccagatgatgaagccgggcattggcagctatgacaagttcaagcgcatgttcgagaagtacaccaaggaagcgggcaaggagcagtacctgattccgtacttcattgccgcccaccccggcaccaccgatgaagacatgatgaacctggccctgtggctcaagggcaatggcttccgcgccgaccaggtgcaggcgttctacccgtcgccgatggccaccgccacggccatgtatcactcgggcaagaacccgctgcgcaaggtcacctacaagagcgacgcggtgaccatcgtcaagagcgaagagcagcgccgtctgcacaaggcgttcctgcgctaccacgacccgaagggctggccgatgctgcgtgaggcactgacccgcatgggccgcgccgacctgatcgggccgggcaaggaccaactgatcccgctgcaccagccgagcaccgacagctaccagagcgcccgtcgcaagaactcgacgccggccggcagccacaaggtcgccaaggaaaccaccaccaggatcctcacccagcacaccggcctgccgccgcgtggcagtgacggcagcaacccgtgggacaagcgcgaacaagccaaggccgcggcccaggcgcgcaacaagcaggccgccaaggaacgcgccgatgcggccaagggcaagggcggcaagcctgcgcgcaagccggtcgtgccacgttgatcacagcctgaacatgccagacgccagcctcgtgctggcgttttgctttctagctgttgggtaacctgtttgctaaggtggcgcccattaaatcgctatcgcgggcaagccccctcccacattcgaccgcattccaaatgtgggagggggcttgcccgcgatggggcccgcctggtcaccatcattctcaaggaagaacactcatggctaaccccctggcctccatcggcatggactccaaccgctcgcagttcatggcgcgccaacgcatcgaaagccagatcaacctgccacgcctgttcgcggccattgactccgatccaggtatcgttggcgcaggcgtcgtatacatcgacgccgatttcaacgtcatcaccctgcgcgaattcaagcccatctgcagcatcaagcctaagcgcatcattttgcgtgaagcacagaagtacattgcgccgacgcagtttgctcaacatgtcgtgagcaatcctcgagagtcccgactgattggcgaagccgtcaataccggaatctcctgcctgggggctgtcatcagctgggctgcgatcgccagtggaaccattctggtgcctttcagtgccggcgccagttccgtcatcgttgtggtgggatatgcggctgccggtgcaagttcgctccagtgtttcaacggcattgctcgaacagcgctggaggtcgccaaaccggaggtaaacgattggctcgacagtgagggctggtaccagaatgcatccgttgtgttggacgccgtatcactggccggcgtaggcggttcggccctgacgacggtcaagctggtcagggctgccaaagcatcgacgggcaagagcctgcgtgacgtgcttcgcggtttgaatcgccaggaaagagccaagctgacgaaagagctgctcagcatcaaccatcccagcttgaccgcgaagatgctcaagttgaggcaggcgtcgggcgaactcaccaagcgtttcacccctacgcagctcaagcacagcaccactacccagatcaaagacgtcctcggcgcaaccataggatttggcgggagtgcgtactccggaaacgtcaataccatcgcgatagggttgtacgaggaaataaacgaatgaacgagttaatgacgctacgcgactttttcaggcattactttctgacgtttcttggcggtgtattcgctgcttacttttcgttggcgttggctgtggcgctggcctttgtcacctattttcgtgatgtgccccttgctcaagtggggctcaagatcatgtctgccggggcgctgctcattctgttgacggtccatagcaactttatgattttgcggggccgcccctcctgggtgtgggtgatggtcggcatctacgtcgcctgtctactgtttgtagttccgatgattcaattccagcctcacaaaattctttatgggttggcgctgttattcccattgctcggattattgacacttaacagcaaggttcaacgagagatgcgtcagaagctgcttgagatccgccacctgcgccaagccgtgatcgccaagcgcaaaaccggctgattgggtagattccccacccaccttcacacccgcgccacaaatatgtgcgtcacttgcaccagagcatcgccgttggcgccgttttggtgctgtactgcaccgggtcccacgataaagcgcaatgaccgccgctctggcataagtcttgcgcgctttgtgtccatgccctggctcgcaggaggccgccgtgtcgattcatgtcgcgttgcaccacgttacgcattaccgctacgaccgcgctgtcgaactcggcccgcagatcgtacggttgcgtccggccgcccatagccgcacgcggattctgtcctacgcactgaaagtgctgcccgagcagcacttcatcaattggcagcaagacccccagggcaattacctggcgcggttggtgttcccggagaagaccgatgagctgcgcatcgaggtcgacctggtcgccgagatggcggtgttcaacccgttcgactttttccttgagccctacgccgaaaaaatccccttcagctatgccgccgatgaacagcgcgagctggcgccgtacctggaaaccctgccgctgacgccgaagtttgcggcctaccttgcgggcatcgaccgtactccattgccggccgtggatttcctggtcggcctcaaccagcgcctggcggccgatatcggctacctgatccgtatggaaccgggcgtgcagacgccggaattcaccctggaaaacgcctccggctcctgccgtgattcggcctggctgctggtgcaattactgcgcaacctgggcttggcggcgcggtttgtgtctggctatctgatccagttgaccgccgacgtcaaagccctcgacggcccgtccggcaccgaagtggacttcaccgacctgcacgcctggtgcgaagtgtatttgcccggtgccggttggatcggcctggatgccacctctgggttgttcgccggtgaagggcatatcccgttggcctgtagtcccgatccctcgtctgccgcgccgatcagtgggctggtggaaccctgcgagtgtgaattcacccacgaaatgtctgtagagaggatttgggaggccccacgggtcaccaagccctacaccgaggaacagtggctggcgatccaggcactgggacggcagatcgatggcgacctgctcaaggacgatgtccgcctgaccatgggcggcgagccgacctttgtctccatcgacgatcccgacggcgccgaatggaacaccgccgccctcggcccggacaaacgccgcctgtccgccgagctgttccagcgcatgcgcaagcactacgcgcccaaagggctggtgcacttcggccagggcaagtggtaccccggcgagcaactgccgcgctggtcgctcaactgctactggcgccgtgacggcgtgccgatctggcacaacagcgcgttgatcgccgatgagcgagaggattacggtgcggacggcgtgatggccgggcgtttcctggccagcgtcgccgagcgccttaagctgccggcacgctttgtgttcccggccttcgaagacaatttctactacctgtggcgcgaaggtgcgctgccgcagaacgtcactgcccaggacccgcgcctgggcgatgagctggagcgcgaacgcctgcgcaaggtgtttgcccagggcctggataaaatcatcgggcaagtactgccgctggcgcgtacgcctgccaatgatcgttggcagagtggccgctggtacctgcgcgataaccactgccgtttggtgccgggggattctcccctgggctatcgcctgccgttggcctcgcagccgtgggtgacggcggcggagtatccgtttgtgcatccgactgaccctaaccaggatcagcccgagctgccgactaccgcccaactgcaaagccatggcgaacctgcgccgagtgatgagcgcgtgcccaaggtggacgagtctgccgactggctgacccgcaccgcgctgtgcgccgaagcgcgggaagggcggctctatctgttcatgccgccgctggagcgcgtcgaggactatctggagctggtggcggccatcgaagccaccgccgaagaactgcactgcccggtcttgctcgaaggctacgagccacctgccgacacgcgcctgagcaacttccgcgtcacgccggacccgggtgtgatcgaagtcaacgtgcagccgtccgcctcttgggacgagttggtggagcgcaccgagttcctctacgaagaggcgcggcaaacccgcctgactaccgagaaattcatgatcgacgggcgccacaccggcaccggtggcggtaaccatttcgtgctaggtggcgccacgcccaaggactcgccgttcctgcgtcgccccgatctactgcgcagcctgatcagctactggcacaaccacccgtcgttgtcctacttgttttccggcctgttcatcggcccgacctcccaggcgccacgggtcgacgaggcgcgcaacgatgcactgtacgagctggaaatcgccttcgcacaaatgcctgctcccggcgaagaatgcccgccctggatggtcgaccgcctgctgcgcaacctgctgatcgacgtgaccggcaacacccaccgcgccgaattctgcatcgacaaactctactcaccggacggcgctaccggccgcctgggcctgctggaactgcgtgcattcgagatgccgccccatgcacgcatgagcctgacccagcaactgctgttgcgcgccttggtcgcgcgcttttggcgcgagccctacgcaccgcctaagctggcgcgctggggtaccgagttgcacgaccgtttcctgctgccgcacttcatcgagcaggattttgccgatgtgatcgtcgagctcaacgcagctggctacccgctgcgcgccgagtggtttgccgcgcacctggaattccgttttcccaaggtcggcgactacgccgtcagcggtatcgagctggaactgcgccaggccctggagccctggcatgtgctgggcgaggagggcgcggtgggtggtacggtgcgctatgtggattcgtcgctggaacgcctgcaagtcaaactgaccgggctgccaccgcaacgctacctgctgacctgcaacggcatcccggtaccgctgcaggcgaccgggcgcgttggtgagttcgtcgccggcgtgcgttatcgcgcctggcaaccggccaactgcctgcaaccgaccatcccggtgcatgcgcccttggtgttcgatctgctggatacctggatgcagcgttcgctgggcggctgccagtaccatgtggcccatccgggcgggcgcaattacgacagcttgccggtgaatgccaatgaggcggagagccggcggatggcgcggtttttcaggcttgggcatagccccggcaagcttcccgtaccgacggtaaccgtcaacgatgaattaccgatgaccctggatatgcggcgccaccccaataaaaatgactgaacactgtttaaatgtgggagggggcttgcccccgattgcggtgtgtctgctgtccatctgttgcctgacagtccgccatcgggggcaagccccctcccacagtagattgcagtgaatttgagttaatctgagcccccttgcccctgccgagcgttccatgtccgacttgctcgaccgttacccgctgaccgcgggcacttatcacgaactgctggacgacagcggcgcagtgcgtgcccattggcagcgcctgctcgaccacctgcaacgcagcacgcccgcacaactggcccagcgccaggcgctgctgacccggcagatccaggaaaacggcgtgacctacaatgtctacgccgaccccaagggcgccgaccgcccctgggaattggacctgctgccccatgtgctggccgccgatgaatggcagcacctgtccgccggtatcgcccagcgtgcacgcttgctcaatgccgtgcttgccgacctgtacggtccgcaacgcctgatcaaggaaggcttgctgccggccgagttggtgttcgggcataacaatttcctgtggccgtgccagggtatccagccgccggacggtgcctttttgcacctgtacgccgtggaccttgcgcgcacgccggatggccgctggtgggtcaccgccgaccggacccaggcgccgtctggcgccggttacgcgttggaaaaccgcaccatcgtgtcccgtgcctttccggatctgtaccgcgacttgcaggtgcagcacctcaccggtttcttccgcactttgcaggaaaccctggcccgccaggcgccgggtgacgaccagccgccgctgatcgtgctgctcaccccgggccggttcaacgaaagctatttcgagcacctctacctcgcccgccaactcggctacccgctggtggaaggtggcgacctcaccgtgcgtgacagcacggtgttcctgaaaaccctcagtgggctgcgccgggtgcacgcgatcatgcgccgcctggatgatgacttctgcgacccgctggaactgcgcaccgactcggccctcggtgtgcccggcctgctcgatgcggtacggcaaggcaacgtgctggtggccaatgccctgggcagcggtgtgctggaatcccccggcttgctgggcttcctgccgaagatcaacgagttcctgtttggcgaagcactgatcctgccgtccatcgccacctggtggtgcggtgaagcgccggtactggccgaggcgctggagaaactgccggagctgctgatcaagcctgcgtttccgtcgcagagtttcaccccggtatttggccgcgacctggacgacgcacagcgccaggccctggccgagcgcatgcgtgcgcggccctacgcgtacgtcgcccaggagctggcgcagctgtcccaggcgccggtgtggcacaccgtcgatgaccacctgcaacaccgtgccatcggcatgcgggtgtacgccgtggccagcgatgagggctatcgcgtgttgcccggcggcctgacacgagtggccgccgaagccgatgccgaagtggtgtcgatgcaacgcggtggtgccagtaaagacacctgggtgctcggcgagcgcgcttccggtggtgaacattggcgtgcacagcgcgcaatcggcgcccatgacctggtgcgccgcgatccttacctgccgtcccgtgtggtggaaaacctgttctggttcggtcgttattgcgagcgctgtgatgacagtgcgcgctggctgcgcatcgtgctggcgcgttatgtggacggtgacgatccgctggccttgcaggctgccgtcgagctgggcgagaacctgcgtttgctgccggaagagggcgagttgccggaacgcctgctggcggcgttgctcggtgacgactggccctcaagcctgcgcgccaacctgcaacgcttgcagtgggcggcgtcccaggtgcgcggcaagctgtcccgggagaactggcaggccctggtggagctgcaacgtgaagccctggagctggaaagcgagtcaccggattttggcgagttgctggactttctcaaccgcctggtaatgtccctggcggcgctgtccgggttcgccctggacgacatgacccgcgacgaaggctggcgcttcctgatgatgggccggcgcatcgagcgcctgcaattcctcagcagcagcctggcggcattcctgcgcggtgtggccgtgttcgatcaggccgggttggagtggttgttggaattgggcaacagcagcatcacctatcgctcgcgctacctggcggtgccgcagttgatcccggtgcttgatttgttgctgctggatgaacagaacccccatgcggtgctgttccagctcaaactggtgagccgcaccctgcgccgtctcaacgatgactttggcgtgccgcgtgaaaccggccttggcccgttggtggagcgcctggcgcgcttcgacctgggctgcctggagaacccgctgttcggcgaatccagcgtgcgtgccgcgctggacggcctggccgacctgctgcaagcggtggccgatgagagtgggcaagtgtcggatcgcctggccttgcgccattttgcccatgtggatgatgtcagccagcaaacggtgtcggtgtgatgagtgcgcgctaccagattttccacgatacccattaccactacgacagcccggtgtcactggcccagcagctggcgcacctgtggccacggccgtgcgcctggcagcgctgcagctcgcagcaactggatatcagcccgcagccgtcgtcgcgccgcgatgagctggacgtgttcggcaacccgatcacccgcctggcattcgagcggccccatgacgaactgctggtcaatgccgggctgaccgtggaagtgctggcgcggccggtgctggatttccagcaatcgccggcctgggaccagacccgcgaccgcctgacttacagcagccagccgatgccaggcgagttgatcgaagcctgccgctatcgtttcgaatcgccctacgtgcacctgaagaaaaccttcgtccagttctccgaaagctgtttcccgcctggcgcgcctttgctgctgggcgtgcaggcgttgatggaaaaaatcttcagcgaattcaccttcgatgccgaagccacccaggtcgccacgccgctggtggaagtgctggagcgccgtcgcggcgtgtgccaggacttcgcccacctgatgctcgcctgcctgcgctcccgcggcctggcagcgcgctatatcagcggctatctgctgacccagccaccgcccggccagccacggctgatcggcgccgatgcgtcccatgcgtgggtctcggtgtattgcccggtttcaggctgggtggactttgatccgacgaacaatgtgcagccggcactggagcacatcaccctggcctggggccgggacttttccgatgtgtcgccgttgcggggggtgattctggggggagggagccatgacccggaggtgcgggtgacggtgatgccgctggaatgatggttgattgtgccgagccggagcagccggctcagcacaaaggaaattattcagccggatcttttggtgtttcgctctcgtcgctcgttacttcagcatctgcatccgggttcagtgcgccggcctcttcgtctgcagcggctttcttgcgttgcagtttttcctctttcttctgttccttggccaagtctctctgacgtttggcgaaggagtaattaggtttggccatgggcgatcctctagggtcgaaggtgagggtggcggcgcgcagctgccttgggctgccatggtagcagcttagcaccgcgcttggccttcacttaccgcaggcgtaggcggccagcaggccgttgaacagttgattgaggtgcatggctcgggctccagtgggtgatgggccgatcataatcagcgtgcggcactttggctggttgattgtgtcgataagtctgatagcctaaagttgtatacaatctgttgattcaggtcataagaatttctgcctgcttcaggcacccttgtcgcattacgcgttttttaaaccctgccttggagattcacatgtttgccaaactcgttgctgtttccctgctgactctggcgagcggccagttgcttgctgcagagtgcaaggtcactgtcgactccaccgaccaaatgtccttcaacaccaaagccatcgaaatcgacaagagctgcaagacattcaccgtcgagctgacgcactctggcaacctgccgaaaaacgtcatgggccataactgggtgctgaccagcgccgccgacatgcagccggttgccactgacggcatggccgccggtatcgacaagaactacctgaaagacggcgacacccgcatcatcgcccacaccaaaatcatcggtgccggcgagaaagactcggtgaccttcgacgtgtcgaagctggccgccgggactgactacgcgttcttctgctcgttcccaggccacatctcgatgatgaaaggcactgtgaccgtcaagtaacaccgcatcatcgttcatcgggggcaagccccctcccacattcaaccgcattctcatgttggaactcggtcaactgtgggagggggcttgcccccgatggcgtcttgacaatcaacacgaaactttcggcttcaccttatggcgcaaacggcatgacccgcttgtgctccgtcttgcgatacgtctcgcagataatcctgaacgcttcctcacgtaccggctcgccgtgcaggaacgcatcgatctccgcgtaggtcacgccatgtgacgcttcgtccggcttgcccggcgacaggtcttccaggtccgcagtaggcactttttccaccagcgactccggcgccccaaagtgccgcgcaatcgcacgcacctggttcttcaccagcccgctcaacggtgccaggtcgcacgcgccgtcaccgaacttggtgaaaaagcccatcaccgcttccgccgcatggtcggtgccgatcaccaggccaccggctgcgccggcgatggtgtactgcgccaccatgcgcatgcgcgccttggtattgcccagcacgaaatcgcgggacaccgccgccttgccttcaaatgccgcgacctcactggccagggctttgaccgccgggccaatgttcacggtgtggcgctcgtccggctcgataaagtccaccgaggccgtggcgtcgatttcgtcgaactgggtttcgtaaggcaggcgcacggcgataaagcggtaagcctcatcacccgtgctttcacgcagttccttcattgcacgttgggccaagaggccggcggtcagggagtcgacgccaccgctgatgcccagcaccagcgccttgagcccggacttgcgcaggcaatcctggataaacgccacgcggcgggcaacctcggcctcaagggcggcctggtcgttgaacggcgcttggaccttgagctgctgcgcaatctcacgctgtacggcttgcatgattcactccttgcttggtagggcaggtactttgaaaacgtgacgcaaataggcgacgaaattcgggtcggtgcagtgggtcttgcccgcttcatcggagatctttgcgacgggctggccattgcaggccgtcattttaagtacgatgctcatcggctcgacacccggaatgtcacaggtcaggttggtgccgatgccaaagctcacattgatccgaccacgcagcgcgcggaatatttccagggccttgggcagcgagaggctgtcggagaacaccagggttttgctcatcggttcgatgccgagcttgtggtagtgggcgatggctttttccgcccactgcaccgggtcaccggagtcatggcgcaggccgtcgaacagcttggcgaagtacaagtcgaagtcgccgaggaacgcgtcggtggtgatgcagtcggtcagcgcaatgcccagcaggccacggtattcgcggacccagcagtccagcgcggcgatctggctgtcgatcaggcgtgggccgagttgctggtgggccatgatccattcgtgggccatggtgcccagcggcttcatgtcgaactcgcgggccaggtgtacgttgctggtgccgacaaagcgcccggggaagtcatgcttgagcacgctgaccacttcttcctgcacgcggtacgagaagcgccggcgcgtgccgaagtcggccacttgcagctcggacagctcgtcgctgctggcgttggcggtcagccagtcgaacttgcggtacagctgttcgcgggcctgttcgaggatcaccgtctggtagcgatagcgattacgcacttcgctgacgatggccagcatcggcacttcaaacagaatcacatgcagccacggcccgcgcaggcggatgaacagctcgccgttctcgatgccagtctgcacgtagcgcagattgaagcggaacagcccaaggaaacgcaaaaagtccggcttcatgaagctgatacgctccaggaagcccagttgatcggggctcaggctcaattcggcgaggcgttcgatctggtagcggatctccgccaggtacgggcgcaggtcttcgctgttacggcaacggaactcccattcaacttccacattggggtagttgtgcagcaccgcctgcatcatggtcagcttgtagaagtcggtgtcgagcaagttctgcacgatgcgatcggcaaacacactctcgctcataacgggaatctccagacgggacggcgatgggcgccgacctttacgcacaattaagaaaggggactagtggcgcatagacgtgggtcggtttgccagtgttttttcagtcggcatctagctgctccatcatccacttcacaaaatcacgcacttttggcacctccgccgaatgctccgggtaggccaggtaataggcgtcctggctcggcatcgcatgttgccaggggatcaccagtttgccctcggccagttcctctgccaccaggaagcgcggcagcaaggctacgccgcagcccacctgcgccgcccgaatgcacatatagaaggtatcgaaacgtggcccgtggtagctgtgttcggtctggtaaccctggctggcgaaccagtcatgccagccctgggggcgcgaggcgttttgcagcagcaccaggtcgctgagttgcgtggggtcggtgaagggccgcgccggcaggctttccggtgcgcacaccggcaccagttcttcgctgaacagcttcaggctctcggtgccagggcgtgaaccctggccgaaatagaaggccatgtcggccttgccttgcagcagctcgtccggctcctgctcgttgcacaggtccaggtggatctgcgggtgacgcagccgccagcccttgaggcgcggcaccagccagcgcgcgccgaaggtgtagggcgtggacacgcgcagtacttcggtctcgccgccgtaggaacgcaggtagtgggtggacatctccacctgggtgaggatcttgcgcacttccaccaggtacaggtcgcctgccggagtcatctgcaaacggcggcgcacccggcgaaacagcaggtgttgcagcaattcttccaactgcgccacctgtttgctcacggcgctctgggtgagattcagctcctcggcggcgcgggtaaagctcaggtggcgggtggcggcttcgaagcactgtaaggcggtgatcgagggcaaatgtcttttgttcagcacggcgtgcctctttttatgctttgcatgaataaacggaatgatatctcgcctaatcgtcgtttgttggcaagtcttgggccagctacaaataaggcctggatcgccgtgtgtgtgacggtgcgaattttctgtttgaaattgaaggagtgacccatggttgccgcattgcttgatcgtctcggggtaaacccggcgttgtaccagtcgggtaaacaacctgtgcattcgccgatcgatggcagccgtatcggcagtgtgcactgggaaggcgccgccgaggtggagcaacaggtcagtcgcgccgagcatgcattcgaagcctggcgcaaagtgcccgcgccgcgccgtggcgaactggtgcgccaatttggcgatgtgttgcgtgaatacaaggccgacctgggcgagctggtgtcctgggaagccggcaagatcacccaggaaggcctgggcgaagtgcaggaaatgatcgacatctgcgacttcgccgtcggcctgtcgcgccaattgtacggcttgaccatcgcctccgagcgcccgggccaccatatgcgtgaaacctggcacccgctgggcgtggtcggcgtgatcagtgccttcaacttcccggtggcggtgtgggcgtggaacaccgccctggcgctggtatgcggcaacgcggtgatctggaaaccgtcggaaaagaccccgctcaccgccctggcctgccaagcgttgttcgagcgtgtactgaaaaaattcgacggtgccccggagtacctgagccaggtgatcatcggcggccgcgacgccggtgccgcgctggtggacgacccgcgcgtcgccctgatcagcgccaccggcagcacccgcatgggccgcgaagtggcgccgaaagtcgccgcacggttcgcccgcagcatcctggagctgggcggcaacaacgcgatgatcctcggcccaagcgccgacctggacatggccgtgcgcgccatcctgttcagcgccgttggcactgccggtcagcgctgcaccaccttgcgtcggctgatcgcccatgaatcggtcaaggaagaaatcgtcacccgcctcaaggcggcctattccaaggtgcgcatcggccacccgctggaaggcaacctgatcggcccgctgatcgacaagcacggcttcgacaacatgcaggacgcgctggaacaggccctgagcgaaggcggcaaggtgttcggcggcaagcgccaactggaagacacattcccgaatgcctactacgtgtcgccggcgattgtggaaatgcccgagcaaagcgatgtggtgtgcaccgagaccttcgcgccgattctctacgtggtcggctacaccgacttcgccgaggccctgcgcctgaacaacgccgtgccccaaggtttgtcgtcgtgcatcttcaccaccgacgtgcgtgaagccgagcagttcatgtcggcggtgggcagcgactgcggtatcgccaacgtcaacatcggcccgagcggcgcggaaatcggcggcgcgttcggtggggagaaagagaccggtggcgggcgtgagtcgggttcggatgcgtggcgcgggtacatgcgtcggcagaccaatactgtcaattactcgcttgagctgccattggcacaaggcattacattcgactgattctgctggctggaatgagatcaaaatgtgggagggggcttgcccccgatagcggtggatcagctgtacatctgtgggctgacacatcgcgatcgggggcaagcccccgcccacatttgaccgagctgtttgttaggtttcatcacggagtctggcaatgccattacgcgaaacatgtttatgggaacacctcacccccagccgtccggatcgcgctgcgctcaacggcgaggtcaaggtggacgtgtgtgtgatcggcgccgggatcaccggtctgtcggcggccattcatttgctggaacagggtaaaagcgtggccgtgctggaggcgcatcgcactggccatggcggttcggggcgcaacgtggggctggtcaacgccgggatgtggattccgccggacgagatcgaagccggtttcggcgaggcggtgggcagccagctcaaccgcatgctgggcgcggcaccgtcgctggtgttcagcctgatcgacaaatacaacatcgattgccagttgcgccgtgagggcaccttgcacatggcgcacaacgcccgtggcgaggcggacctgcgcagtcgtgaagaacagtggaagcgccgtggcgcaccggtggaactgctcaccggccaggcctgcgagcaggccacgggtactaaaaaaatcgccgccgccttgctggaccggcgtgccggcactctgaacccgatggcctacaccagtggcctggccagtgctgccgccgggctgggcgggcagttgttcgatcattcgccggtcactcaacttgagcgccaaggtgcgcagtggtcggtgcagaccgcccagggctcagtgcaggctgcacaggtggtcatcgcctccaacgcctacacagaaggtgagtggactgaactgcggcgcaattttttccccggttattactaccaggtcgcatctgccccgctgacggacgccgccgccgaacagattttgcccggcggccagggctcctgggatacacgccaggtcttgagcagcatccgccgcgacgccgacggccgcctgttgctcggcagcctgggcaacggcaaccagaaacccacctggttcctcaaggcgtgggccgatcgggtgcagcagcattacttcccgcacctcaaatcggtgcagtgggaatacacctggaccggctgcatcgcctttaccccggaccatttgatgcgcctgttcgagcccgccccgggcattgtggccgtaacgggctataacggccgtggcgtgaccactggcagtgtggtcggcaaggcgtttgccgactatttgtgtcaccagaatccccaggccttgccgattccctttgcgccgatgcaaccgttgtcggcagtcgggttacgcagctgtctttatgaggcgggtttctcgctgtatcacgccggccaatgcctgaggatcgtgatctgatcagcgaaataccgctcaaaagcctgcattttcttagcaggctactaatctgtattggtgcaagtcgtagcagtcgcgcactgtaaatgtgcagttccgttacgccggctgttacagctgtaggaactgtcgtttataggtttggttgcaggtgcgacctgccgaggttgtactttttcgatccattggttgcacctctggacgctagagggttgcacgtactggcgaacggagccgaaacgcctgcaataacaatgacaccgtgtctttttgaagaataaaaacctaatggcacgcgctttgctctgggctttcagtgaaaagtttgaacgcaagttgtcgtgccaaaaatcaaaaatatcggagcaccactcatgtcccagacgttttacaagaaaggttttctggccctcgccgttgcagcggcgctgggtgtttctacgtttgttcaagctgatgtgaagattggcgtggcgggcccgatgacgggtgccaacgctgctttcggtgagcagtacatgaaaggtgcccaggcggcagccgatgtgatcaacaaggccggtggcatcaacggcgagaaaatcgtgctggtggccggcgacgacgcctgcgaacccaagcaggctgtagccgtggccaaccgcctggcggaccaggacaaagtgatcggcgtggtcgggcacttctgctcctccaacaccatcccggcgtccgaggtgtatgacgaagccggcatcatcgcaatcaccccaggctccaccaacccacaggtgaccgaacgcggcctgggcgccatgttccggatgtgcgggcgtgacgaccagcaaggcatcgtggccggcgactacatcgtcgatgtgctcaagggcaagaaagtcgcggtcatcaacgacaaggacacctacggcaaaggcttggccgacgccaccgctgcccagttgaccaagcgcggcgtcaagccggtgctggaagaaggcctgacccgtggcgagaaagacttcagcgccctggtcaccaagatccgctccaccggtgccgacgtcgtgtacttcggcggcctgcacccggaagccggcccactggttcgccagatccgtgaagcgggtctgaaagacgtgaagttcatgtccgatgacggcgtggtcaccgacgaactggttgccaccgctggcggtaagcaatatgtcgacggcgtgtacatgaccttcggcgccgacccgcgcctgctgccggacagcaaggcggtggtggaagagttccgcaagaacggcaccgagcctgaaggctataccctgtacgcctacgcgtcgctccaggccctggccgccggcttcaacggcgccaagtccaacaagggcgaagacgctgccaagtggctcaaggctcacccggtgaaaaccgtcatgggcgagaaagcctgggattccaagggcgacctgaaaatctccgactacgtggtttaccagtgggataaagacggcaaataccatcagttggaaaagcagaagtaagactgagcgccgccgttccaatgtgggagggggcttgccctcgatagcgcagtgtcagccaacgcatgcatgactgacgcaccgcaatcgggggcaagccccctcccacagggggagtggtgttgttattgaaatctgttttttcctccagaagcgccgcacacctcccggtgtgcaggtgctcaccgcgtgagattgcgttatggatggtattttcctgcagcaactggtcaacggcctgaccctcgggtcggtctatggcctgatcgccatcggctacacaatggtctatggcatcattggcatgatcaacttcgcccacggcgaggtttatatgatttccgcttacctcgcggcgatcagtctggcactgctggcttacttcggcatcgaatccttcccgctgctcattctcggcaccttgatcttcaccgtggtcgtcaccggcgtgtacggttgggtcatcgagcgtgtcgcctacaaaccgttgcgcaactccacccgactggcaccgctgatcagcgccatcggtatctccctgatcctgcagaactacgcgcagatcgcccagggcgcgaagcaacaaggcattcccaccctgctggcaggcgcctggcgcgtcgatttcggcacagggttcgtccagctcacctacaccaaggtcttcatcctcgtggcggcgttcgccggcatggggttgctcacctacgtgatcaagtacaccaagctcggccgcatgtgccgcgccacccagcaagaccgcaagatggcctcgatcctcggcatcaacaccgaccgggtgatctcctatgtgttcgtcatcggcgccgccatggcggcattggccggcgtgctcatcaccctcaactacggcaccttcgacttctatgccggcttcatcatcggcatcaaggcgttcaccgcggcggtactcggcggcatcggctccctgcctggggcgatgttgggcgggatcatcctcggtatctccgagtcgctgttctcggggttgatcaactctgactacaaagacgtgttcagtttctccctgctggtggtgattctgattttccgtccccagggcctgcttggtcgcccactcgtggcgaaggtgtaaacatgtctgctgccaaatcaatcgatatcaagaaaagtgtggtcgatacgatccttgccgggctgatttcgctgatcgtgttcggtccgatcgtcggcgtggtactcgacggctacagcttcaacctggaaccggcccgcgtcggcctgctggtggccatcgtgatggtcggccgctttgccatgagcctgttcctgcaaacccccaagggcctgaagattttgcagggcttcgagagcagcggctccggcgtgcatgtgctggcgccggactacaagtcgcggctgcgctggatcatcccggcactgatcgtgatcgccatcgtgttcccgatcttcgccaacaagtacctgctcaccgtagtgatcctcggcctgatctacgtgttgctcggcctgggcctcaacatcgtggtaggtctggccggcttgctcgacctgggttacgtggcgttctacgccatcggcgcctacggcctggcactgggttatcaatacctgggcctgggcttctggaccgtgctgccattggcggccatcgcggcggcgctggcggggtgcatactcgggttcccggtgttgcgaatgcacggtgactaccttgccatcgtgaccctgggctttggtgagatcatccggttggtgctcaataactggctgtcgtttaccggtgggccgaatggcatgccggtgccttcaccgaccttcctcggcctggagttcggcaaacgggcgaaggatggcggggttccgttccatgagttcttcggcatcgactacaaccccaacatcaaattcctgttcatctacatcgtgctgttcctggtggtgctggccgtgctgtatatcaagcatcgcctgacccgcatgccggtcggccgcgcctgggaagccctgcgcgaagatgaaattgcctgccgttccatgggcctgaaccatgtgctggtcaagctctcggcgttcactatcggtgcatcgacggccggtctggccggggtgttctttgccagttaccagggcttcgtcaacccctcgtcgttcaccttcttcgagtcggcgctgatcctggccatcgtggtgttgggcggcatgggctcgacggtgggcgtggtgattgcggcgtttgtgctgaccgtcgcacctgagttgctgcgcagcttctccgaataccgcgtgctgctgtttggcgtgttgatggtggtgatgatgatctggcgaccgcgaggtctgatccgcatcagccgtaccggtgtgacaccacgcaagggggtagcgccatgagcaaggaagtcgtcctctccgtggaacacctgatgatgcacttcggtggcatcaaggccttgagcgatgtgagcctcaaggtcgaacgcaactcgatcttcgccctgatcggccccaacggcgccggcaagaccacggtgttcaactgcctcaccggcttctacaaagccagcggcggcaagatcgaactgaacatccgcggcaagcagaccaacgtgatccagttgctcggcgagcgcttccagccgaccgacttcgtgtcaccgaaaagcttcttcagccgtatgtactacaagatgttcggcggcacccatctggtcaaccgtgccggtctggcccggacgttccagaacatccgcctgttcaaggaaatgtcggtactggaaaacctgctggtggcccagcacatgtgggtcaaccgcaacatgctggcgggcatcctcaacactaagggctaccgcaaggccgaaagcgacgccctcgaccacgccttctactggctggaagtggtggacctggtggactgcgccaaccgcctggccggtgaactctcctacggccagcagcgccgcctggaaatcgcccgcgccatgtgcacccggccgcagatcatctgcctggatgaacccgctgcgggcctcaacccccaggaaaccgaagccctcagcgcgatgattcgcctgttgcgcgacgaacacgacctcacggtggtgctgatcgaacacgacatggggatggtgatgagtatttccgaccacatcgtggtgctcgaccacggcaacgtgatcgccgagggcgggccggacgcgattcgcaacgacccgaaagtgattgccgcctacctgggcgctgacgaagaggagctggtatgagcgcacctatcctcgaaatgaaggacctggatgtgtattacggcccgatccaggccctgaagaaagtctcgctgcacatcaacgaaggtgaaaccgtcagcctgatcggctccaacggcgcgggcaagtccacgctgctgatgtcgatcttcggccagccacgggccgagtcgggggagatcctctacaacggcgtcgacattacccacaagtcgtcccactacatcgcctccaacggcattgcgcagtcgccggaagggcggcgggtgttccctgacatgaccgtcgaggaaaacctgctgatgggcaccatcccgattggcgacaagtacgctcaggaggacatgcagcgcatgttcgagctgttcccacggctcaaggaacggcgtacccagcgtgccatgaccatgtccggtggcgaacagcagatgctcgccattgcgcgggcactgatgagtcgtccgaagttgttgctgctggacgagccgagcctgggcctggcgccgattgtggtgaagcagatcttctcgaccctgcgcgagctggcggccaccgggatgactattttcctggtggagcagaacgccaaccatgcgctgcgcttgtcggaccgcgcatacgtgatggtcaacggcgagatccgcctgaccggcactggcaaggagctgctggtcaacgaggaagtgcgcaacgcctacctcggcgggcactgatctaaataacgacgcggtccccctgtgggagggggcttgccccctcccacattaagccgatccacatgtatttttgtggtgtgaatagggttgccgccaaattgtggaaaacaaatccagccctcctccaaagcgcgacatatagccgccgcaaatccctgttttgtcacagttttgacttgtccccatccgctgtggaaccggctgtgggtaacgtgggagtagctggctgaaagccaacaaacacgcggcctgtagcgcggtgattgttttttgatcagcgggtttttgggtaccgcccgagcccgttgtcaacctgtttaaagacacaggtatatgactggaatatgtcccggcagcctgtggataagtctgtgactaaactctggaaagaccgccgcagaggccggaatgactggcctggagccatcgttctggtttgccgttcgtagaagggcctacatacgcaccggccaaggtcaagcaaaaaactttctaaaaccgcctgcaacccttgtgtatagaggcctgaggcattttgcacttgcccccaaagactgtgggcgcagttgtggataacctgcgcgcatatggctgtaagccacggtctataaggctttgctttaagtggttaaaaagtgatcaggcatgtgttaacttgcgtgcccagtagttgccgacatcgcggcgtacgggcattctgctggctgtttttttcccgatgcccgcaaggagaacaccatgtccgacacgctgtttattagtggcgcaacctcaggtttcggcgaagcctgcgcccgtcgttttgccgaagccggctggaaactggtgctcaccggtcgtcgcgccgaccgcctgaatgcattggtcgaagagctttccaagcagaccgaagtgcatggcctggtcgtagacgtgcgtgaccgcaagggcatggaagacgccatcgccaacctgccgccctcgttcgccacattgcgcgggctgatcaacaacgccggcctggcggtgggtaccgaccctgcacccaagtgcaatctcgacgattgggaaaccatggtcgacaccaacatcaagggcctgctcaccaccaccagcctgctgctgccgcgcctgatcgcccatggccgtggcgccggcatcatcaacctcggctccatcgccggcagctacccgtacccgggcagccatgtgtacggcggctccaaggcgttcgtgaagcaattctcgctgaacctgcgttgcgacctgcagggcaccggcgtgcgcgtcaccaacatcgagccgggcctgtgcgagagcgagttctcgctggtgcgttttggcggtgaccaggcgcggtatgacgcgacttatgcgggggccgagccgatccagccgcaggacattgcagataccatcttctgggtgatgaacacaccggcacatgtgaacatcaaccgcttggagctgatgcccgtgagccagacctgggctgggtttgcgattgagcgtggggccaagtaaggctttaaaccgcttcgctgccatcgggggcaagccccctcccacacttgaccgagttcagcatgtgaatgcggtcgaaggtgggagggggcttgcccccgatggcgtcagatcggccaaaacaggccataaggtacactcacctcctgaaaacccctccgcactctgcggattcaaggtttttgacgggaggaaatgtgagtaaccgaggtgagcaggcactgctcaaacaatcgaccatcctgatgttcgccgtggcgatcgccgggattgtcacgggtgtggtatccggcgcccagtccattctgttcgacggctttttctcgctgatcgccaccgccatcaaggtgctgatgctgatcacggccaagctgatcgccaagaaaagcaacgagcgcttccagtttggctactggcacctggagcccatggtgctgctgatcgaaggcagcttcctgttgttgatcgccatctacgcgttcctcaacggcgtgttcggcattatcaatggcgggcgcgagatcgagttggggctggtgatcatctatgcggcggtgtttaccgtcgtcgagttcggctatttcttctacgtgcgctaccgcaatcgcacgctgagatcatcgctgatccagttcgacaacatcagttggctggtggacgcgatgctctcggtgggcctgctgatcagctttctggcggccctgctgctcaagtcccagggctatggcgaatgggcggtgtatgtcgacccgttgatcctgatcctgctggccctgagcatgctggcgccggcgttcaagattttgcgcccggcgttgcgtgaggtgctggggattgcgccggaccacctggacgacaaggtgcgcgaggtcatggacgcggcacaggccaaacatggtttcgacgactacgtgtcctacgtgcaaaagcacgggcgcgcacggtttatcgagattcatgtggtgttgccggcggattacccggtggacaacgtcgcgaccctggatgggttgcgcgaagagatatccacagggctcggcacgccggatgcggcgcgctggttgacgatcagctttaccggagatcgcaagtggattgcataaggccctggtaacaggtcgccaagtgatacggcgtggtcgacggcatatcccgtcggctcaccgcgcccttggcatccaggcattcatgccagcctttggcatgcaaaaagtgctgttgcagcgccagcaactggcgctgtaaccgcgcttcgctgtcgggccgcaaggtcagtgcccgcaggtactcggcctgggcccagatgcgctgggtgctgtcacgcactgtgccatccagcgccaacatgccgctgacggcgccactctcgttatccacacccttgagttcggcgtaggcgaaggcccgtgtcagggaggcatgcaacggcgtaccgcgcagtacttcggacgactccagcaagaagaaccactcgaactggtgccctggctcgaaccagttatccacagcacccagcggtttttccatcatcacgccgtgctggcggtcgatgaagcgctgctgcatggcgttggccaggtccagcagggcgtcctgcgtgatggcgtcgtcgcgcacggccagggtggcgaggaagccttcggcgaggtgcatcagcgggttttgcagggggccggacttgacggatgaccagttgcgttccagcaccgcttcgtacaggccgtcgcctgtggaaaaccgttcggcgaccactgccagggcggcattgagcacagattccaccagcggctcacgcaccttggcccagtaatgggcgcaggcgaagatgatgaacgcgtgggtgtacaggtctttgcgcttgtccagcggtcggccggcggggtcgatgctgtagaaccagccgccatgttcggcgtcgtggaagtgccgttgcagcgagcggaacaacgccgccgcacgttcttcggcaaaggccgcatcgggtccgccgatcaggctggcgaacaggtacaactgccgggcgcaggccatggcgcggtagcgttgcgggggtaatggccggtggtcggcgtccagcgcctcgtagggcaatgccaggtcggcattccagccggggccttgccagagcggcacgatcaggctgtggaagtgcgtgagcacggtgttcaaggagggttgggaagcgctgggcattggctggcgtcgtcacggcaggggtgtaggcgcgcatggtagcaggcttgggttctgtggtgtctggtctagcgctatcgggggcaagccccctcccacaaggtgggagggggcttgcccccgatgaggccgtcaaatacgccgcaaatcagcctgccaacaaccagaccccggtcgccgccgaagccgcccccgcaacccgcaccaacggcgccgccgccgccggcaggaagcgcaccaccgcgtaaccggcagcatgcagcactgcggtcgcagcaacaaaacctgccgcgtacgcccacgggctggacatgtccggcagctccaaaccatgggccacgccatggaacagtgcgaacaaggctgtcgcgccgaccgccacgaacaacggcggacgcaccgccagcgcgactgccaggcccagggccagcaccgacgcggcaatcccgctttccagcgccggcaacgccaggccttcaaaccccagcacgccgccgatcagcatggtgcccacgaaggtgcacggcagtgcccagcgcgcggcgcctttttgttgggcggcccacaagccgacggcgaccatggccaacaagtgatcgataccgctcaggggatggctgatgccggccaccaggccgttgtcgccgtggcccgggtgggcgaaggccagggcaggggccagcagcagggcggcggcggtcagcagtttcttgaggttcatggacaggttccttatgggttgatcaggcggcggtcagcaggccttggcgttcgatgaaggcgacgatgtcatccaggccgacgccggttttctggttgctgaacacaaagggtttaccgttgcgcatgcgggtggtgtcgctgttcatcagctccagcgaggcgccgaccagtggggccaggtcgatcttgttgatcaccagcaggtcggacttgcagatgcccgggccgcccttgcgcggcagcttgtcgccggcggacacatcgatcacgtagatggtcaggtccgacagttccgggctgaaggtcgccgacaggttgtcgccgccggattccaccaggatcaggtccaggccggggaagcggcggttgagctggtccacggcctccaggttgatcgaggcgtcttcgcggatcgccgtatgcgggcagccgccggtttccacgccgatgatgcgttccggcgccagggcctggttgcgcaccaggaagtcggcgtcttcgcgggtgtagatgtcgttggtgaccaccgctaggttgtagcgatcgcgcagcgccaggcacaaggccagggtcagggcggtcttgccggagcccaccgggccgccgatgccgacgcgtagaggttgtgcgttcatgtgtgttgtctcctaggaacggaacaggcggctgtattggcgctcgtgggccatgcacgccagggacaggccaaaggcggcgctgccgagttgatcagggtcgatgcggctggcgtcctgctgggcgtgttgcaacagcggcagcagttcgctggtcaggcgttgggcggcttgctggccgagcggcagggttttcatgagcaccgccaattggttttccagccagctccacagccacgcggcgagggcgtcggcggggctgatattccaggcgcgggcggccagggcccagcccagggcgaggtgaggttcggtgcactgttgaagaaaggtgcgggccgcgtcgtccaactcgggcaggccattgagcagttgttgcagggagtagcccatctgccggctttcctgatacagctcgcgggtttcacggctggcgcggtgttcttcacccaactgcgccagtcgcgaccaatctgcctccagggcggcctggcaatgggcgagcagcaacggtgcctcgaaacgcgcgaggttgagcagcaactggtcgctgatccagcggcgcgcagtggccgcatcgttgacgcggccgttctcgacggccatttccaggccttgtgaatagctgtagccgccaatcggcaattgcggactggccagacgcagcagcgcccaggctgggttcatagacgcacgccgaactggtgcagcttgggtgggtagttgaagtcttcatcaccatggcgcgaatgatgatggccgccaccataggcaccatgctccggctggaagggcgcttcgatggtttccgtctgtgcacccaactgttcgagcatggccttgagcacgtagtcgtcgagcaggcgcaaccagccgtcacctacttgcaacgccacgtggcgattgcccaggtgataggccgcacgggtcagttcgaatgcactgctgcaggtcacgtgtaagagttgttcaggccgggcgcacacgcgtacgacgcgtccgtcttcagcctgcagaaattcaccatcgtgcagcggtggctggccgcgctccaggaaaaggccgacgtcttcaccgtcggcactgaaacagcgcaggcggcttttgctgcgggcttcgaaattcagcagcaactcggcggcccagagggcttggggggcgattcggcggtggatcaccagcatcaggcagcttccagctatgagcgatgaaacagctagagcaaggggcttgccaacctcgtcgaggcgtaggaaatgcctgtaggtatgcggggtggcgccactaaatagggcgtgaagacattgcgtgtatgcgccaagttggtgcaagagattgcctgttgcacgcggggtgggcgttttcggattttccctacatggtctgaggaatcggcgttcatcaggttacctgcgagatctttagcctgtgcgtcgtgttttatccacagcgacgttcatcatgttcaagtcactttgttatctattcattgtcagcctgacgtttgtgctttctccggcctccgccaacttgcaacaccctgcctctttctccgtttcactgaaagaggcatccatcaatgatgtgatcgaccgtgcccaccaactgctgggaacgccctacaaatggggtggcacctcggcggatcagggcttcgattgcagcagtttcctggtgtatctgttcaagacccaagccaatatccagataccccgcacgacggtcgcgatgcaccgctccacggccccgaccatcaaacgcaacgcgctcaagcccggcgatgcggtgtttttcaaggggaatgggcgcggccaggtcagccatgtgggcctttacatcggtgaggacaaatttattcattcgccgcgtaccggcaagagcatccgcatcgattcgttgagcaacagctactggaacaagaactacaccacggccaagcgcttccactcggcgggatgatggcgttactcggtgctgcccaggccttgccagtgcttcaaaccgataaagatgaagcgcagttgctgggtgattttcgcctgaggcgtgaggtggtcaggcagggcctgggccggcgggtcgatgatgtcgggcagggtggcgaacacacttttaacgatcaggtcagccatcacgtgcaaaccttcggcatccaggtgctgcagcttgggcatcagggtcaggtcggctgccaggtcgcgggtgatgtcttcgcgcaaggcgccgatcgcttggcgcaccgcgaggcagccaccgtattgttcacgggccaggaacaggaattgcgaacggttggccgagaccacatccagaaagatccgcacggaggcatcgataatgccgcccatcacgaattcgttgtggcgcaccagacggatcgtggcgcggaaggtttggcccacttcgctgaccaggacgagcccaagctggtccatatcggcaaaatggcggtagaaaccggtaggcacgatgccggctgtcttcgccacttccctcaggctcaggctgccaaacccacggccacactccatcagatggcgggctgcgtccatcaaggcgaggcgggtctgttgcttctgttcggcgcggggcagcattggcaggcgggctttgtcggcaagtacagcgacgcactctagcaaaacagcttcgctggcgtcgaacttggcggggagggcttgcgtaacagtctctacaaaaagtcaaaagcccgatcggctgatcgggcttttttctgggccaccacggggttagctctgtgcttgatgcagttcttgcagacggtcagcgccgccttcggcaataccttgggtgtaggcacgctcgttggcttgttcagcgccaccttcaaccaggcctttctgttccagacgatcacggccaccttcggcgacagcgttgcgttccagcaggcgatcagcgccaccttcaaccagacctttctgttccaggcggttgcgaccgttttcggtcaggccttcggtgtaagcgcgtttgttggcgtgttccgaaccattttcagccacagcgcctttggcgtagtcacggttttcttcttcttgcgaaccgctgcgagcgacggtctggctgaaatgagcggcgtcggctttgacttgtggggtggcctgttcggcggctggcagggcaaaagcactggaagccaggatggataacaggacggtagcgagtacttgacgtttcatgatgggttgctccttgggagggcgataaagtgggtacagggctaatgctactctcgataagtcgatataaaagttcataaacacaatggtaataatcaacagaattgattgttctaggcggaggctctagaacgggcctctcaagcacgcggttttgcaccggtgtgggtattttcgacacgcgagtgggtaacaatggtgcggtgccgtagggtaaatctgtcgaagtggtcagaaaatgaggtttttcctggcaaatcgaggattgggttaaaccccgcgacggtttgccagtcgtagtcctataagctgtccttaaaggctgtcacccagccagtcgtattcaggagtcctgtgcaatgacgcgcacgcgtaaaatcgccgcttggagctgcgccagcttcgtgctgttaatcgccatcgtggtattggtcctggtgttctttgactggaaccgcatcaaaccgcccctcaatgccaaggtctccgaagagttgcatcgaccctttgccatcaatggcaacctggcggtggtgtgggcgcgtgagcccgatgaaggcggctggcgtgcctgggtgccgtggccccatgtgattgccgaagacctgaccctgggcaaccccgactggtcgaaaaacccgcagatggtcacgctcaaaaaggtggaactgcgcatttcacccctggcgctgctggtgcagcgcgtggtgatcccgcgcatcgacctcaccgagcccggcgcgcaattgcagcgcctggccgacggtcgcgccaactggaccttcacgttcgaccccaaggaccccaacgccgagccctccaactgggtggtggacatcggtgccatcggcttcgacaaaggccacgtgaccctcgacgaccagaccctcaagacgcaactggatgtgatcatcgatccgctgggcaaacccattcccttcggcgaaatcgtaggcgacgccgatgccaagaaggcgctggaaaaaggctccgcgccacaggattacgcgttcggcctcaaggtcaaaggccagtaccacggccagaaactcgacggcagcggcaagatcggcggcctgctggccttgcaggacgcggccaagccgttccctctgcaagcccaagtcaagattgccgacaccagcatcgccctggccggcaccctcacagacccactgaatctgggcgccctcgacctgcgcctgaaactcgccggctccagcctgggcaacctgtatccgctgaccggcgtgaccctgccggattcgccggcttattccaccgatggccacctgatcgccaagctgcacgagccaaccggcgcctcgttcagctatgaaaatttcaacggcaagatcggcaacagcgacatccacggcagcctcgcctacgtcgctagccaaccacggcccaaactcagtggcacgctggtgtccaaccaactgctgatgaccgacctcgcgcccctgatcggcgccgactccaacgcccagcaaaaagcccgtggcggtgacagcaagcagcccgcgaccaaggtgctgccggtggaggagttccgcaccgagcgctggcgcgtgatggatgccgatgtggaattcaccggcaaacgcatcgtgcacagtgccgatctgccgttcaccgacctctacacccacctggtgctcaatgacggcgaactgagcctcgaacccctgcgtttcggcgtggccggcggcaagctggatgcgcagattcgcctgaatggccgtaccacgccgatggaaggccgcgccaaactcaccgcgcgcaacttcaagctcaagcaactgttcccgactttcgaaccgatgaagaccagcttcggtgaactcaatggcgatgccgatatttccgggcgcggcaactcggtggcggcattgctgggcacctccaacggtgacctgaagatgctcatcaacgacggcgcgatcagccgtggcctgatggaaatcgccgggctcaacgtgggcaactacgtggtgggtcgcctgttcggcgataaggaagtgaagatcaactgtgcggcggcgaacttcggtatcaagaccggcctggcgaccactcgcctgtttgtgttcgataccgagaacgcgatcatctatatcgatggcacggcgaatatggccacggagcagcttgatctcaccatcaccccggaatcgaaaggcttccgcctgttctcgctgcgttcaccgctgtacgtcaacgggccgttcatcaagcccaatgccggggtgaaagccattccgctggcattgcgtggtgcaggcatggtggcgctgggggtgatcgccggaccggctgccgggttgctggcattggtcgcgccgagtggcggtgaaccgaatgagtgcgcgccgttgctgcagcagatgaaggaaggcaaggcgccgaaaaccgtgaaaggctaactgcaaatgtgggagggggcttgcccccgatggcggtagaccagtcgacatctcaattgactgatccaccgctatcgggggcaagccccctcccacatggggttacaggctttctagaatatccgccatgtcgtccgcatgctcttcttcctgcgccaggatctcttcgaacaggcggcgcgtggtcgggtctttatcaccgatgtactggatgatttcgcggtagctgtccacggcgatccgctcggcgaccaggtcttcgtagaccatctccttgaggtccttgccggccacgtattgcgcgtgggagttcttcgacagcaggtccgggttgaactccggctcgccgcccaactgcacgatgcgttcggcgagtttgtcggcgtgttcagcttcctgggtggcgtgttcgaggaactcttgcgcggcgacggcggccttgatgccgctggccatgaagtaatgacgcttgtagcgcaacacgcagaccagttcggtggccagcgacgcgttgagcaggcggatgatttcttcgcggtcggcgtcatagccctcggtcacggcaccgttttcgacgttctggcgggcgcggctgcgcagggtcgcaacgtcagtcaaatttgcttcggtcatctcaatctcctggggctaatccggttttgcgccacgctctgtcggcgtgatcgctccaagttgtgagtcctggagaaagcaaaaagttttattggatttaccgatagcgtcataagcccgacttgaggctgggctaggctggatggatcggattgagaggatgcccggttcatgccgcagtcgttggccacgcgctaccccctggtgttggtacccggcatgctcggcttcgtgcgtttgggctggttcccgtactggtacggcatcgtcccggcattgcgggcgggcggggcgcaggtatttcccgtgcaagtggcgccgctggactccagcgaggtgcgtggcgagcaactgctggtgcagatcgagcgcattcgccgcgaaaccggtgccgacaaggtcaacctgatcggccacagccaaggctcgctcaccgcgcggtatgcggcggccaagcgccccgagtgggtcgcctcggtgacctccgtggcaggccccaatcatggctcggagctggcggatcatatccacctgcattaccccgctgacggcgtgaagggccggatcatgagcgcgctgtttcacctggccgcctgggtgatgggcgtgctggaaaccggctatcgcggaccgcgcttcaagacggacttgcaggcgtcccatcactccctgaccagtgccggcgtggcgttgttcaaccagcaatacccgcagggattgccgcagacctggggcgggcagggcgccgaagaggtcaacggcgtgcgctattactcatggtccggcaccttgcagccgggcatcaccgaccgtggccgtaacctgttcgacggcacgaaccgcagttgccgtttgttcgcccgcagcttcgtacgggagaagggccagtgtgatggcatggtcgggcgctacagctcacacctggggttggtgatcggcgatgactacgcgctggatcacttcgatatcgtcaaccagtccctgggcctggtgggcaagggtgcggagccgatccggctgtttgtcgagcatgcacggcgcttgaaggcggccggtgtttaacgcactggggtggtccagcgctccgacaagatcaccccgcccaaggtcagcaggccgcccaccaggtgatacagcgccagttcttccttcagcaccacggcggcgatcagcgcggtgatcaacggcagcaggttgaaaaacaacgtggtgcggctcggccccagggtcttcaccgaatgcatccaggccagcggtgccagcatcgacgccagcaggcacgcatacaacaccagcggaatattggcccagcccaggccggccttcgccgagaacaggaacagcggaaacagcaccaccaccgccaccagcacctgcagatacagcagcaccagcggcggcaggcgcagttgccatttcttcagcagggtgctgtagaccgcataggccagggtggcgaccagcatcatgccgtcacccaggttgaccccgtgttgcagcagtgcgccgaggctgccggcggacacaaccaccaccacgccggcgaatgacagcaccgcaccggtcagcgcgccgtaggtcaggcgctggccgaggctgatgatggccgccgccagcgccatcaatggcatcagtgacaggatgatgcccatgttggtcgccgtggtgagcgacgcggcgtagtaggccaggctctggtacaccgccatgcccagcacgccgaggatgaacactttgcccaggttcgggcggatctgcgcccagtgggcaatcaccggcttgagcatgaatggcgtaaacagcagtgccgccagcagccagcgatagaagccaatctccgccgggaagatcgagcccacggccagtttgttgacgacggtgttgccggcccagataaaaatggccagcaagggataagcgtattgcatcgaaaggaacccggtgtgtagatgaggcaggattatccattgtctggatcgaagcctatactgcgatccagacaacccactgctgtatccagacaacatggccaagcacaacgtacgcctccaggatttcccccaactgccgagcccggtgtattttcgctattcggatttcgcccccgacaccgagtgcacgccgcaccagcatttctggggttcgctggattactccgccagtggcgtgatgcgcatggaagtggccggcagccgcttcatgtctccgccgcagtacgccgtgtgggtgccgccgcataccgaacacagctcctacaatgccgaggcaattgtctaccactcggtggggctggccccggaactctgtgagcaattgccccggcagccgtgcaccctggccatcagcgatatcctcaaggccatcctcagtgacttcgcccagcgcgatgtgaacatgccgcagaccgagtcggacatccgcctggcccaggtgctggtggaccaactcaagcaggcgccgatccacgagtgcttcctgccctacgcccgtcaccccgggctgctcggcgtgctggaaggcatgcaggccgaccctggcgataaccggcccctggcgcactgggccgagcaggtgcacgtgagcgagcgcaccctggcgcgtcagttcgtgcgggaactgggcatgagcttcggtgaatggcgccaacgcctgcgttacctggccgccatcgaggccctcgacagcgagcgcagcgtgcaacatgtggcgtttgacctgggctacagcaccgcctcggcgtttatcgccatgttccagcgccaggcgggatgtaccccggagcagtaccggcgcgcccatattcgtagtcggtgaagatgtaacaggctttgactacactgctggataggccgtgcccttcggtgcggtaacagggagaaaactccatgaagatgctgcgaattccgctgttgatgatgggcttgctgctgtgttcccaaggctttgccgccaccgcccagcaaaacaaaatgaccacctgcaacgccgaagccaccaccaagacgctcaagggcgacgagcgcaaggcgttcatgaagacctgcctgtcagccccggcggcgaatgacgccaagaccctgacaccgcagcagcagaagatgaaggattgcaatgcgtcggcgaagaccaaggcgctggccggggatgcgcgtaaaacctttatgagcacctgcctcaaaggctgatcactctttcgcgagcgccgcagatcaacggtgggagccgggcttgcccgcgatacaggcgcctgggtctgtctggtacaccgcggcgaggccatcgcgggcaagcccggctcccacacttgatcgcattcacaaccgacccactcgcttgattccctcaaggctggcagactgcccatcctttaacgccgttcgttttgaggctgtatgccaacgttttctcagcgtcacgtgctattgctggccagctacatcatcatttttggcgggttgctgctggtgctgccgctcaaactgctgcccagcctgctggccggcctgttggtctatgaactggtcaacatgctcaccccccaactgcaacggctgatcgaaggccggcgcgcgcgctggctggcggtagcgttgctcggcacgttgatcgtcagcgtcctggcgctgatctttgccggcgccatcagcttcctgctccacgaagcggaaaaccccggggcgtccctcgacaaattcatgggcgtggtcgaccgcgcacgcggccaactgccgccgttcctcgacgcctacctgcccgccagcgccgccgagtttcgcgtggccatcggtgactggctgagcaagcatttgagcgaactgcagcttgtgggtaaggatgccgcccacatgttcgtcaccttgctgatcggcatggtgctcggcgcgatcatcgccctgcagcgcgtgcccgacctgaccaaacgcaaacccctggccgccgcgctgttcgaccgcctgcacttgctggtccaggcgtttcgcaacattgtcttcgcccagatcaagatcgccgcgctcaacaccgccttcaccgccgtgttcctcgccgtggtgctgccgctgtgtggtatccacctgccgctgaccaagaccctgatcgtgttgaccttcctgcttggcctgctgccggtgatcggcaacctgatgtccaacaccttgatcaccattgtcgcgctgtcgctgtcgatctgggtggcggtggcggcgttgggttacctgattgtgatccacaaggtcgagtacttcctcaacgcgcggatcgtgggcgggcagatcagtgccaagtcgtgggagttgctcttggcgatgctggtgtttgaggccgcgtttggcttgcccggcgtggtggcagggccgatttactacgcgtacttgaagagtgagctgaagctcgggggtatggtttaagccttgtattggccagtctggcctcatcgggggcaagccccctcccacattttgatctgtgaacacattcaaaggtgggagggggcttgcccccgatgggcgcgccgcggtgtttcagataaaactcagctgccgtagcgcttgctggcctcaatcgccaagccgctgccgatactgccaaagatgttcccttccacgtgccgcgcatttggcagcatcgccgagatgctgtggcgcagtgccggaatcccgctggaaccgccggtaaagaacaccgtgtccacctgggccacgctcaccgaggcatcgttgagcaactgcgtgacgctgttgcgtacgcgctccagcaggccatcgatggcggattcgaacaaggcgcggctcaactccacgctcaagccgggctcaacccggtccagcagcacatggcggctgtcgtcgtgggtcagttggatcttggtttcttctacttccatcgccagccagtgcccggcgcgctgttcgatcagtttgaacaggcggtcgatgccgccggtgtcttcgatgtcgtagcgcatgctgcccaacgccagctgggacttttgcgagtacaccgagttgatggtgtgccaggtggccaggttcatgtggtggctggtgggcatgtaggccccgctcttcatgcggctgccgtagccgaacaacggcatcatgccgttcagcgagagctgtttgtcgaagtcggtgccgccgatatgcacgccgccggtggcgaggatatcgctctggcggttgtcgttgtgacggcggtccggcgacaggcgcaccagcgagaagtcggacgtaccgccgccgatgtcgacgatcagcaccaattcttctttctcgatggtggactcgtagtcgaacgccgccgcaatcggctcgtactggaacgagatgtccttgaaacctatcttgcgcgccacgtcgaccagggtgttctcggcttcctggtcggccatcgggtcgtcatcgacgaagaacaccgggcggcccagtaccacttcttcgaactcacgcccggcgttggcttcggcgcggctcttgagttggccgatgaacagcgccagcaggtcggtgaacggcatcgcggtgccgagcacgctggtgtcgtgcttgatcagcttggaacccagcaggctcttgagcgagcgcatcagccggccttcgtagttttccaggtattcgtgcagggccaggcgaccgtacaccgggcggcgctcctcgaagttgaagaacaccaccgacggcaacgtgatcttgtcgtcctccagcgcgatgagcgtctcctcgccggggcggatccagccgacggtggagttggacgtgccaaagtcgatgccgcaggcacgggctggggatgggtttttcatgtctatcgggttccggttgaaaaacggccgcgcagtgtatgccagtcgaaggcggatgcgtaggccgactatccgctaaatcgcgcttgaaagttgggtatttgcccccacatctgttgcatacggcaagtgccgataacactttgacgcacccccaggccacatcactcgacaagtgcaatgcagcgcacgttgtgcccagggctgtgcgatctcgattaaggatggtgaaccgccgatggatttcaaagactattacaagatactgggcgtagagccgaccgccgacgacaaggaaatcaaggcggcctatcgcaagctcgcgcgcaaatatcaccccgacgtgagcaaggaaaaagacgccgaagccaagttcaaggacgcgtccgaagcctatgaggcgctcaagagtgccgacaagcgcgccgaatacgacgagctgcgcaaatacggccagcatggccaaccgttccagggcccgccgggctggcagagccgtggcggctttggcggcggtggtggcggtggtggcggtgaggacttctcggacttcttcagctcgatcttcggctcccgtggcgacgcttttggtggcggccagcgccggccagccgggcgcaaaggccaggacgtggagatgcagctgtcggtgttccttgaagagacgctgtccaccgagtccaagcaggtcaccttccaggtgccgcagtacgacgcgtcgggccgtcacgtgagcaacaccaccaagagcctgaacgtgaagatccccgccggcgttaccgacggcgaacgcattcgcctcaaggcccagggcgcgccgggcattggcggtggtgcgaatggcgatctgtacctgatcatcaagttcgcgccgcatccaaaattcgaagtggatggcgaaaacctgatcatcaacctgcccctggcaccgtgggagttggcgttgggtgctgaagtacaggtgccgacgctgaccggcaagatcaacctcaaggtgcctgccggcagccagaacggccaacgcatgcgcgccaagggccatggcctgctgaacaaggccgggcagcgcggcttcctgttcgtgcagctcaaggcggtaatgcctaaaggcagcattgatgaggtcaaggctctgtggcaggagctggcgcaaaaggcggcgttcaatccccgcgaaaacttctgagggcgtgaacgcctgggcgcccgttactgcgggcgggaggcgccgggttgctggtgatcgccgccgtgcggtgtcagctcggccacctcccggcgtgacagctccagcagcttgaggttacgttcggtggcctgctcgatttccagccggttcaaggcctcgaggtaggcgtcatcaaagtcttggtgtgcatcttccagggcgttctgccgtgcgtcggcattgcgcttgagggtggcgaactcgtcggcataccgctgcttgaggtagtccacccagtagtcccggctgatcaggtcctcgtaaaacacctcactgcgttccgcgtcgagaatgttgcggcgcgcgtcggccagttcagtgccagtgattggccggctgaaccgcatgtggcggggttgcccaggcagctccagctggtccggccatcccctggccagtccgatgcggtacgacaagcgcacttccgccacgtccgagtgtgggagcagcgtcctgtcggcctcgacttcggctctgcccagccggaacaactgccgggacaggttcaacagggccgcacctctcagatccagccgcgccgtatcgacgttgagcaacgcgttgtgctcgtagaccctgacttccagcccgctgaaggtcaggatgcggccatcgacgcaggtgccgtgcgtatgggacatggcgaacagcgcctggcgcagttcggtgttatcggcggccgcttccagcacgttgcgtacccgctgcgacaggtcggcgcgagccgcgccgaactccgtagtgtcctgcaaccgttcgagcaggtgaaaaaacgcctggtgatccggttcggcctgcagttgtgtccagatctcccgcagcctgccttgctcaggaaggggcaggtcgtctatccaaggcaccggttgttcaggtagtgcgggttgcgccgggagctcttcgtcgggttgttcagggaagatttcatcgggctctggtgatgacgggagcccatcgtccagcattgtctggatgtcccggcgtgacaggcccagcgccgagtcacgccccgtgcggtccagatactcgataagcgccgtcaggctgtcgtgcgacaaggggttgtcggagatatctgtaccctccatcaaggcatcgtggctgccatccagtgcttcggtcgggattgcactgatgtcattggcgctcaggttgagcgtgcgcagatgaccggcttccaatgtgccggccggccaatcggtgaggcggttaccgctcaggttcaacacctcgaggggcgagccaggctcgagactgaaaaactccatcaggttgtcgctcatgtccagacgttgcaggtttggccagtcatccaggccgatggccaactcatcgtcgaatcggttggatgacagatccagctccctcaactcaggtaattctgcgagtgccctgggcaagccctgcaactcgttgccggtcaggcgcaatgtgcgcaggttggaaaagcctgcgaggaaaccgttggagccttgttcggcgaacaggaggccgctcaggtccaggtgatgcacatgggaaaagtccgccgttaccaccggcaggttgtccagttgcaagccgttgaaactcagggtctggcccgccgggtccgacgccagcccctggcgccagcacgtgacgatgcgttgcgcggcctggttgcggcgactggccacggaccagtcggtggctggcgagcctcgcgtgtacagccagccattgagctggcgtatcagggtgtgcagggcctcattccagacgtcgatcagagcgtgcaagtgcgtgtcactggcgccgcctgcgcgcaggcgtgtcagccattgctgtaacgtctgctcatccatgccgtgctgcaaacgttgcaggcgttgcggcaggggcaggccggtgtcggcggtgggcaggtcgagcaggtggcgggccaatgaggctccgctttcggcctcggggaatacgttggtgggtggttcctcataggcaaaacgctccagggctccggcgggcaggccccgggcggtttcaacccgctgtcgggccacagccagcgcgccttcggaaacctggctcaacggcgtaccgaccacgttggtactgagcagcagctcgtctctggtcaggattgcctcgggcaacacggtgatgcgggtattgcgcaggttcagcgaggtcagttgcgccaagtcctcgagaccggtcggcacttgctgcaggttcgtttctcgcaggttcagcgtcctgagtcgtggcatgtgatcgagctcaaggcgcgtgaggggattgccttgcagcgagagatgttccagtgcgacgaagtcctggagctcggagggggcggcggccagctcgcagtagttcagttcgacagtgcgtgcctgggtgaatgcccggacgaaacgactgacctgctccatgggcacacgcaggttcatcaggcgcaaggctagggtgtgggggaagctgttggccggcaattcgggcaggcttgaggggctgaaaccgcgtagatccacttccagaaatgagcttggccgcgcgcgcagtgggtcagccgccgcgtagaggttgagcagcccgcgactccattgcacccgcaagtaaccgcccatccatcgttggtttgcgtgttccaccgcgtggggaggacgcagccactcgttcagccgccggtcgatttcactgtactgttcgctcagcgcctcaatcgcgtcaaagcgggcgcggtgaccgacccagcgttcggcgaagctgttgatcaacacctgcgagtcccgagcgggctccgtgaggcgtgccagttccccgacacagtaaatccgcaccatttcctctaggtcgatcaagtgatcgggttggttgttcagccgggtatagagcgctctgaagctgtcgcgcgacattctcgaccagtccagcgagaggccggacagcaggcgctggtgaccttccagcaattcggccggaatactctggataccggtgccgcgcaggttcaggcgctcgagctggggcaggtcctgcacgccaaccggccaatcggtcacctgagagccgactatttccaactggcgtagccgcgtcaggcggctgacatccagactgggttggtgagtcggcgcaaacacgttgttgttggcaatgctcagctcttccaactggctgagcgtgcccagggtgttgatgttttcggccgagagcggtgaaaagagctgcaatctcgtcagtcttggccagtgtgtcaatgtctcgagctggttgatgctccgcgggccggtgacgaagatatgcaggctttccacgctggggaacaagccaggcaattgctccagcggttggccgtgggtgaccaacacgcgcacatgggaaaaatccgccgtcaacggtggcaacggggcgtcggtggtgagttcaagtctagcggctgtctgcacgtcactggcgaggggcgcattgcgccaactggccctgaggttttcggctgtggtattgcgcagcatggcttccagtgaggtgggcggctgcgttgcaacccactgcgccagtgtgttttccagggttccccattcacgcccgcgtgcctgcaacagcccgtagatctgcgcgtcggtttgcccggcgcggcgttgctggaggataaagccgttggcctgctcgtcgctcaggtcggggtacaggtcttgcacgcgcgtgaccagcgacgggtccatgccggcgccacggccactggcgtagtaaccggcctgattcacgcggatgcgcgcaggcggcttgaaccgcgtcgcctcaccacggggctggcccagccactgcggcgccaggtgacggtgctcgaccgcactgcgaatgatgctgcgctgcaactcggcctgctggcccacatggggaacacccaacgcctggcgcgcttcgtcgggcagggcatgcagcaccgacgcgtaaaagttgtcgccatacctgggcaggctgttgagggcctcgccgcgctcgtcgaacgcctggtagaccgggcctttcttgaccaggaatttgcgctgcatcgcgtgctggttgccgatggcctcgatcagccggccacctacgtgttcatcgcggatttccaggcgcaccgcgtccgaccagcccggcagtttctgcaatgcgtgcagggccaggcgcttgctgtcggtggtcgcgatgtgatccgtgtgcagcccggcataggcgcgggcctggcgcccttgtcgtgcataccagcggccttcttcgagcaaggccagcggcactttgccggtgctctccaggcgctcgagggcttcggcactggcgtggaccaggatgtcttgcgctgctggcttgctcagccccggacaggctttttgcaattgtgtgatgcgcaggtcagtgggtttgggcccttcatagagactttcgaaaatcgctgatcgacgggtctgcgcaaagtcggcgatctgttttctgaactccaccggccttgcctcgcgcacccgtgccgcctcgccaccgagcaggccggtgatctcgtcctcgtccagcgccgccaggatacgccccggcagcccgctgcccagtacatccgcgcggctcatacggatgggcgccctggcgcgcacgccggcatacaagcgctcggcgccgtactgaatggatttcccccgcaggctcggaccgtcaaagacctccagcacccgacccgccggccagcggggcaactcagtgaccagcggcaggatgtacagataacgctcgtccaccgccgtgccggtctgcacctggctgatcacctcttcgacgcccctgtcggcttcaaacaggcgcatggcatccgtcaactcgggcggcggtggctggttgtccaggtggaccttgcgcagggtgttatcgctgacgccgctgacttcggcgatcttcaacaattgctcgtcggaatactgttcggtcgcgttgccgaaccggcgtagcagcgtgagccggtcccaggccagtgggcgttccagggtgtggcgccaggccccttgcccgttgtgccgcagcagcggctgataggcatccggatcactggggtgctgaatgcgccactcgccgggcggtgtaccttggcttatttcgtagtgcttaccgtcctggcggatataggttttgccgttgaccgcataacgtccctggggatcggggctggcctcgggcgccagggcaacgtcgcttgcataggcgttcaggtcgggcttccacaggcgggtttctccgttgggcaaggtgactgactgcaacccctcgatcaccggttcagccggtaccgccgtcaatttggccaggcctcttcctacccccacttgagcagcaagcaacaccaggttctccgccacatcaatcaggtgagccttggccgctttgcgatcaccttcggaccactccttcacaccttcgaaggtttcgtacaggagctggccggccatcacggcgatcatgacttcacccagcaccggtacgaatatcgacaccccggtcaacagcagcatgccgatattgagcagcgccgccaatttgcgcgaacgcacggtggcatccacttgcgcggtcggcacggcgtggctgcgggcgtcggcgtagactttggcgcggtgttgctcgtagaggtaggtccacaggtcgaagttatcgatccagaagataccgctgtgcacgggcgcgataacgacagggttcaggtacggatcgtcgttggccacctgctggatcgggttgggcggtggcagggtgttgacccggctgaacagggaaaacgggtcgagcccctggcgtatctggtccagcaagggcgcatacggggccaggtcctgggcaaccgtggtttccgaggtgtcctgggtgaattggctgaagtagtccgcgcggtcggcgtaatcgacgaactggctgaaaaaacgctggtaggcgctggggctgccggcggtggccgggggcgtgtcgcgggcggtgaagcgctctttgaacagtggcttgagctggcgcaaggtgtagcgtttgaggggcgattgcggatcgtcggggatgtacagcagcaactcgctcgcgttgtggagctctccgctgaccagaaataccaccacgcccgtgagacggtgcttcatcaaactcaagtcgcgaaaccagatgcgttggccgttcagcatcggttcggtttcgccgccgaccaccgcgagcaccatgcggtagtccgcgtcggtgatgtcttttttcagcagggcctgttcagcggcaacgcgcagggaggccttgtgggcggtgatgaatttgtcacgcactacggcctgcgtgaccgcgtctttgggctccaggtaatccttgaggtaggcctggtacttcgcgccgatgtccagtgagcggcacagcccagtgaattgcgccacggtcagtgatgtagacactgcgtcgaattcatctccggtcttgaccacgaaccccgacgaagggtgaaaggcgttggcctcacattcagcctcttcgaagttgtgcagggcggcttgcagcagaggcagcttcagggcttcgaaccaaccggccgtgatcgagaaaacgccgacggtgatggattttctgagcctcagaaaggttttatcgacatccagctgcaccttgaactgatcgttcaacgcctgggtcaacaggggccgggcaaaggtgtcgatgtcttgcatcgcggacatggccttgtccagtttgccttgcgcagtgaagcttgcggtgatggcgtcttgcagcgatttgcgttgtgctggcgaggcgtgctggtaccaatcgggcgtcgtcgcgggcgtcgttttcagggcttcacgttgctgcgcagtggcctgggtcagccaatcgggaatggcgttttcgagaaagggggtgtgcaggctttttgaagcgggtgaagccgtcatgctgtctctccttgggtagtggagcagacagcagatcacttcggcaggcgcggctagcggtagatagagaacaccaccgaaggctggcgccagggcgggcaaccctggcgccgggtggtcaggtgatcgggttggcgcgcagctccgtgcgggtcagtgtttcaatcaggttggcttcctggatggcaagctgggcctgcaagtccctggcctgctgcgcgtagtcggcgtcgcccagcgagccttcgacatgctggtcatgcagcgctgccaggcgctcatggaagggctggccctgcgcctcgaattgctcgcggtacttctgggtcaagtactcctgccagaattccctggagatcagcgcctggagttcggcgggcgaattgttcagcttgaggatgttgtcgcaggtggccttcaacacctcttcactgacccggcccaggccgatgaactgcgccgattgcggttgtcccggcaaatcgagtctggttttgtctttgagcccgaatcgataggcgagcctgatttcaacttcctcgagcatggcgatctgctcggctttctcctgcgccgacaaccttgggttgttgttgatcgcctcggtgcgcctggcgatatcgttgagcgcggttttttccacctcgtcgagacggaacaagcccctggacaatttgatcagtgcggcgccttgattcacatcggcagccagggtcttggcgttgtgcaccatggccatgacttccacgttgctgaacgacagcccggcgcgatcacagcaggtcgcgcggcctgcccattcgaacatctgctcgcgcaacgcggcggattcttcggagttttgtgtgatggtgtcgatcaccctccacacccgttgttgcaggtctgcatggccgccgcgaggttcactcaggccttcgagcatagcgaagaaaccgtcactgccaggctgttcgcgcaattgccgccactgggtttgccgggcggcgacctggtcctcggccaggtcttgggtccagcgttgagtctgcgtcggctcgatcatcacatggtcccgaatgcgcggcggcagaggtgtgcgcgccggggcgagtgccgagatgaccagttggttcgggtggtcggccgaggccaggcctgcctgttcaagcctggccctgtagtcccttagttgctggcgcgtctgctcggtcaacgggttgttgttgagttcgattttgtgagtgagctgcacggactgcgccagttgcgcgtcgggtgggttgatgagcgagccgggcagttgggtgatgcggttatccctcagcgcgaccgtgtccagcaagggttgcgcgcctaaccctgtggggaatgtctcaagcccgcagttttgcaggcccagcgtacgcatatcggtgaacacgctgaagtccggtgtaaggcccagtgggttgtttcccagcagcagcgccctgagcgtggttcgccgggccagcacttgcgcggtttcagcggtcaatcggatctggttgttctgcaggaacaggcgggtcaacccgttcatctcattgagcgccatcggcaactcgcgcaactggttgtttgacaggtccagccagcgcacgccgctatggcgtagcaggaactgctcggggcaggtgctcaggtgcatgttgctcagtttgagtgagcccacgtggctgaaatcggcgtccagttcgggcaggctcggcaggttgaggccgctgaggtcgagttccaggccaatggctgtcccatcgttggcgtgttgtgtcggcgtttccttgcgccagcacttcaggaccctctccctggcctggtagcggtcatccaggtcgatgacattcagcaagcgctgttgcgtgcgcacgtagcctccgccggtgcggctgttggcattgccgcccgccgccgcccaggtattgagttgtgtgttgagcgtctcgaactcttgctccaagcgcaagagttcggtgttggcgccgtcacccagggcccagatgaattgccgggattccagaatactgcgcctcgggtacagcgcccgggtgcgttcaagctgcgggttttgcatatcgaacacatcggcggttccgatcaggtccggacgctgttcgttcaggcgcctccaataggcgtcgaagcgctgggcgtattcttgcgggaatgggttgcctttgaggcgggtgactccgttgatcctcgcgatggtttccagttgctgcggttgtggggcgagattggcctcgggtatttcgcgcaggcggttgttgcgcaggtcgagcagttgcaggctggttttatcctgcaggccggtcggccactgatcgatcccggtataggacaggtccagtgttttcaaacggttcaaggcgctgacgtctggagtgatgcccaggcggttgccgctgagttccagggtttccaactggtgcaggcggctcagttgggcggcgctctgtggggtcagcatgattttgttcgctttcaggctcaactgggccagctggggcattgcgtcgagtccatcgggtaacgctgcgagttcgcagccatccaggctcagggtcttgacctggcggaagttgttcagaaacgtctgggcattgcccgaccacattttggtgttcagctccagtttctcgacgtggctgaagtctgccgtcagcgcgggcaggtccactggcataccgctgatgattttcagcgtattgcccgactcacgacgccagcagcgcttgatgtcctcggcgatcacccgggcgtagccgccagcccggtcgtacgcagtcaccaccaggcgcggtggattggctttgacccaagcctccagatcagtttcgagcttgctgtactcggcttcccgcagcctcagcctggtacgcacgtcgctgcccagtgattcgataaaggcgtcgatttgcgcatcgctgaaagaggggtagagcttgcgcacccgctgcgctgtgctgcgaaatggcgccaccagtttttcgtaaccgcgaccgccgcccagtaaacgcatggtggtgtcgtaggccggcttgcgcaccgggtgttcgagcaacacgccgcgcagtgcctcgcgtggcaagggggcggcctggatggcagcttgcaactgtcgggcgtcggccagccgaaggtcctggcgttcacccgatgacagcgcgtccagaatggcctggtacagatccgtagggcgaggccctttgaattggccgttttctagctgcaccaggattttgcttgtcgtggtgtccagctcgccaatggcatcgagcagcggaccttgggcggagtgctggcgcagttccatgcgtgctccgcgacgccagccaggcagggtctccagggtgcgcagggccaggcgctggctgtcgaggtcgtacggggtgttcaggtgcaggttttcataggcgcgggctacccgggtttcttgttcgacccattgcgccgtttcggcgagcgtgtctggcaggcgcccagtgcgacgcaaggcgagcaggtcttcggcgctgagttgggtgagcaaatatgctgcgatcggtgtcggcagtttggggtaggtgtctttcaagcgttgcacgtccaggtcggtgttggccgtcagcttttgataacgctcctccacctgtgccgccttgaaccgttcgacaaaatcacccagctcccggcgcaatttgccggcccgcattgcaagcgtgtcctggggcgagccggggatgtcgaccagttccgggtcggtgccttgtagcgtgttcagcacttcacgcagtccttcgccgcgtgccagttgttgcgcggtgaggagtaccgtgcgcctgcgcgatgacggtgggtagggttcgtcgtcccatacgatgcgcccctcatggtcgattacccgcagcgtcggggagctggacagcaggccgcgccgcttcatcaagtccagttgtgtgcccaggtccgcctgggggtagacctgagggtcggcgcttttgagctgttcgatgaaggtggtgacctgctgatgaagcctgaaacgctgcaacgagtcggccagcagcaggggcacgttttcggcgttggcatgggcttcacgcaaggcgttggcgctcaccccgctggcttcttgggccttgaacaattgttcgtcatcgagggcctcggcaggcaggcccaggcgccgtagcaaggtggtgtcatcccaggccagtggggtttcgccctcgtggtgccaggcgccttcgccattgtgtgtcagcttcggtgcataggcgtcggtacgggtcgggtgctggatgcggtattcggtgccttccgggtcctgggccacgcgataggtccggccttccagcggcagaatcctctgcccgtcctgggtgtacaagccatgcgcatcgggccgggcatccgccgccagtttgacgggcgatgcataaggctccaggtcgggtttccacaaacgggtcttgccgtcggccgaggtcaccggttgcaattgctcgaccaccggctcggccggcaccgcagtcagcttgccgaggcccttgcctgcaccggccagcacggccagaaacaccaggttctccgccacgtcgatgaggtgggccttggccgccttgcgatcaccctcagcccattcctccacaccctcgaaggtttcatacatcaactggccggccatcaccgccatcatgacttcgcccagccccggcacgaatatcgacacgccggtcaacagcagcatgccgatattgagcagcgccgccagtttgcgcgagcgcacggcggcgtcgacatccgccgtgggcacggcgtgactgcgggcgtcggcatagactttggcgcggtgctgttcgtagaggtagtcccacaggtcaaagtcgtcccgccagaacaggccgctgtgggctggcggcgtgataacagggtgcaggtacgggtcttcgttggggacttgcttgggtggcggtgacgctggcaaatcgttgacccggctgaagatggaaaacgggtccagcccctggcggatctgattgagcagcggtgcaaagggggccaggtcctgggacaacgtggtgtccgaggtgtcttgggtgaactggctgaagtaatccgcgcggtcggcgtaattgacgaactggctgaaaaagcgctggtaggcggtggggttgccgtcttcggccgggggcgtgtcgcgggcggtgaagcgttgtttgaacaggggtttgagctggcccagggtatagcgcttgaggggcgattgcgggtcgttggggatgtacagcagcaattggctggtgtcgtgaagctggccgctgagcaggaagaccaccacgccggtcaggcgatgcttggccaggctcaggtcacggaaccagacgcgttggccgttcagcgtcgggcgggtttcgccggcgatcaccgaaagcaccatgcggtagtccgcgtcgttgatgtcttttttcagcagggcctgttcggcggcggtgcgcagggcagccctgtgggcgacgacgaagtgtttgcgcagcaccgtcgctgcgagtgcgtccttgggctccaggaagtccttgaggtaggcctggtactttgcgccgatatccagcgagcgacacaacccggtgaattgcgccaccgtcagcggggtggataccgcgtcaaagtcatccccgttcttgattacgaaccccgacgttgggtgaaaggcgtcggcttcacattcgtcctcttcgaagttgtgcagggccgcttgcagcagcggcagtttcaatgcctcgaaccagccggcggtgatggacgcgatgctgacggtgatgggtttcctgagcctgaggaaggtcttgttcacatccaactgaaccttgaaccgatcgttcagcgccttgaccagcaggggcctggcaaaggtgtcgatgtcttgcagcgtggacatcgccttgcccagcttgccttgcgcggtgaagctggcgacgacgctgtcttccagcgtcttgcgttgcgccgccgaggcctgttgataccaggcgggcagcgcggcatccgagtgtttgagtgcgctgcggtatgacgaaggcacgtctgccagccaggccggtatggcgtctttgaggaagtcatgatggcggctgtcagtgacggatggagactcaggcatggtgtcgctcctgcaatgaatgagggagtcgacagcacatcatgcgcccaggctcgggcagcggtagataggtagggccgacggccggcaggcgcgacttaggattgcgcgattgtcagatcacacggtagtcacctcatgtccgagccaacctccccacctgcacccattgaacaaggccagcattacgctctgatcaaacaggcgattgcgccgtgcctgagccaggcgtcgccctcgcgtcgcctggcgctcaagcaaaccccggcacagattcccgattggtatgccgccgcctctcaatcgcgcaaagaccaactcaaggcgttgctggacgcacgttgcacgtcgctcaacgcgttggaaaagtccctggcgaagctgcagtcggtgacagccttcgcccagccgctgctggaagcggcgctcagacaggccggtttcgaactggacgtcaatcaaacctggttgcgcctctactatccggtcgaagacgcctttggcgtggcgaccggcgggttcaggaccaagacattctcgttgttgcaggcggccttgaacaacttcgaggcgcgggaagcccgggccgggtttttcaatgcgtcttccgggttcatcaccacgcccgatgcccggggacaattcgagcggcatgccacgacgctgaagatcgagacgtttgcccagctgtgccgtggcctggacctgggcgcgaagtaccaggcccatctcaagtctttcctgcaaccacaggatgcggtcgccgaaggcgtgctgcgcgagcgttacttgaagcaccagagggcggctttcgaagcggcagcctgcctggccctgctcaagggcgatatcgatgacagcgaccatgccctgttgatgcgcgtgctggccggcgagcggcagatcatgctgggcgacaagcaggtgtggtaccgcgtgccctgcctgatgaacctgcacctgcaggattgcctggtgatcgacccttgcgtcaaataccgctactccacatgggtgatcgtttatatcccggacgaccccgaccacccgatcaagcgctacgcctcctatgacgccttcagcaacgccatgaccgaccggctcaaggctgggccggggagggctgctgatcgctctcaagtcgcaccggccacggactaccagcgcttcatcagccagttcgttgcctaccagcaccggccctactactttcgcaggctcaccgagctggtgctggatgcgccgccgcagcccttcgccttgcaatggatacgctcggagtggggccagtacatcaccgagctcttcagcccaccggccatcacagggattgcctcgatcttcggcgattcccagccccaggggcgcgtaccgatcagcgcacctgaattcgatgtcaatgcggtttcgatcaaagggctctgggaagaagtggacctgtggccctatcgatacgaaaacctgcgtacccggctgtacgccgatgcacgcgcccaggccgtgagcaccgcggatgccgacgaagccggacggtctcggcgcctggagcactatctgaatatcggtttgtttggcgtgaacctgctgggcatggtgatcccaccgctgggcgtggcgatgtcattggtgacggccgggcagttgttgtacgaagtgctggacggtgctatcgattgggcgcagggcgaccgtgaagccggctgggcgcatatcaccgatgtcattgaaaacctggcgctgctggcggtcggtgcgaccgtcagccatctcaccctttcgccctttatcgaacagctcaaagccgtgccattgcctggcggcaaggtgcggctgtggaaaccggacctgtcggcctatgaacatacgttgcggttgccacaaggctcggtcgcggatgggcgcgggctccatcgggtcggcggcaaacaggtgctggaactggaaggcaagcgctatgccgtgcaacaggatgccgagaccgagggctactacatggagcatccaacgcgcagcgacgtctacaagccccggctgaccgccaatggcagtggggcctggaatcatgaactggaacagccgttgcgctggcgcggggcaaccctgatgcggcgcctggggccggtgatggacggcttcagcgacgccgagctggagcagatccgtcgggtcagcggggttgaggaagacaggctgcgtcgtgtgcatgccgagggcgagcccgtgccggcgatcctgctggacacggtgcgccagttccgggcctatcacgatgcggtggcggtggccgaggggatcggccagggcaagctctccagtgccctgtgcagcttcccggccttactggtcactgagttgagcggatggccggagcatctggcgctggaagcctattcggacattgaaccgcgcagcgtgtcggccaagtacggtaattcaaaagccattgcgcgggacacgctgcgtctcagccgcatggcgttgatgaggggggagttgcctgcggcggtcatcggctttttgagcgaagcacaaacccacgcgttactgcccggctacaccccaaggaccccggaactacgcattggcgccttgcgcaaacgcctgaaggactttgcggtgaaccagcgcgcccggttgatgcgcagcctatacgccgagcagcagcccactgcgcagcccgccacccaattgattacacgccagtttccacgcgtgccggcgctgatggccgaggagctattggtcggcgctacgccgcaggaattgcgcaccctcaacactgaccagcgcgtgccgttgcgcattgccgaggccgcacgccaggcgcagcagcaaatgcgcctggcccacgcctatgaagggctatacctggaagcgctggcggacaaggataccgaggtcctggcgctcaacacgcttcagtccctgccggggtggaaggacgacctgcgcctggaggtgcgcgacgccgagctggaaggggagttgcgggccagcttcggcgccgaagacgcctctgagcgcaaggtgctggtgcgggtcggcgagggccgctatcaggcgcgcaatattcgtgatgaaaccctgcacgaaaccgaagacctgtatgcggccctgcaacatgccctgaccgatgcgcaccgtcgggccatcggcttgccgagcatcaaacaaggtccacaactgaaggcaaaaatcgttgaaggcgcgctgccacgggatcaactgcggccattgctcaagatgcagcaacgccgctaccgctttgccgaccgcccctcgatgcgcctgcccggcggacggctggggtatcgatggagcaatcatggccaggacactgcctgggggcgcatcgtcgaggagcgcgtgcgcagcctctaccccacgttgaccagcgaacaggtgagcgcgtttgtcgatgggttgggcgtggagccgcacgcgaagctcaaggccctggagctggaatacaaaaccttcgacaacgcgttgcagaactggctgcgcgagcacgtccggcaagtgtccgcagaggctcgccgctctggcgcgttcctgcaccagcggcgcgcgcgcctgaggatcgtcagggccttgcgcgaagcatggcgtcgcaccggaagcgaggacctggatatcagcgggtattcccatggccaggtcattgacctgtctggagaggacctgttcgaccaattggaagaactgcccctgctgaccgtcaacttcgatcacgtctcggcccttgaactctcgggcgccggcatcgagaccgatcccaccccgttcctgcgtcatttcaagcgcctgcgtcgtctcggcctggagaacaacgagctgacggtgctgcctgaggcaatcgggcagatgttgcgtttgactgcgttggacttgtccgaaaaccagatcgtcctggacaccgacgctgtcaatcgcctgaaaggtctgacgcaactgaactacctgggactggagagtaacccgcttcacctggcccccgacatcggccgcatgccggacttgagcatgctgctgctcggcgataccgggctcggcacttggccgcctggcctgttcgatcagcctcgtgcacgttcttttgtactggacctgagtgccaatcggctggacagcgtgccgcaggtcgaaccggggtcaagccaggcgaataccgtggcgcgtacgcggatcaacgcggaaccacggtacatctccgcacagaacctggacgtgatcaggggctatcggcaatcggtagggctggagcctgatcgaccctatccgcccaggggtgtgcttgacagcattcattggcgcacgggcttgagcgatgagcagtgggtcgccaagcagcacctgtgggacagccttgagcacgagcacgggtccgagcctttttttagcgagttgcgcaaactgtccgagtccgcagacacccttgaggaggacgccgccaaagccgacctgacgcgcaaagtgtggaccatgatcgagtctgcagctgcgcaccgggctctgcgtgacaagctgttcattatggccgcggcgcccaccacctgtgtggatgccggcgcgcaactgttcaatgccatgggcattgaagtgctggtggcccaagcctacgaactggtggccgaggacctggtggaacgccaattgctggagctggcgcgcggcaagtcgcgcttggacgagttgggccggatcgcccgcggcagggttagtgaactggtggctcaggggcgcaaattccccgagtacgatgccgaggggctgcgcgtcacgcatcgtgatgcgcaaggcaacgtgatgcgggacatcgacgaggtggagatctacctgatttacgccaccgagttggcttccgaggacaaactggacttgccttggcaatcggcgcgcatgatgttcgaggagccggatgtgacccctgccatgatcgagcaggcacgcgtgcgagtactggccctggaagagggcgacctgttgcgcaagtcgattggtgagcagccgttttggctgggctttctcaagcagtccaatcccgggccgttccaggcgctgcaggccgaggccgaggcggcgttcgatcggtacgccacctcggacccggcacggttcgaggctgaaatggcgaacctggcgacgcaagacaaggccctggtcgccaagctgaccggccaggccctggaccgtgcgcggttgtcgcgtatcggcgtgccgctcgtgggctagaacaggaaatagcgctgcgccatcggcagcacatccgccggttcgcaccacagcaacacgccgtcggccttgacctggtaggtctgtgggtcgacctcgatgtggggcaggtagtcgttgtggatcaggtcggttttctgcacgtcgcgacagcccttgaccacggcaatctgctttttcaaacccagggcttcgggtacgccggcgtcctgcgcggcctggctgataaaggtcaggctggtggcatgcaggctgctgccgaagctggcgaacatcgggcggtagtgcaccggttgcggtgttgggatcgacgcgttggcgtcgcccatcaggctggcggcaattgccccgcccttgaggatcagcgtcggcttgaccccgaagaacgccgggcgccacagcaccaggtcggcccatttgccaacctcgatggagccgacgatatggctgacgccgtgggtgatcgccgggttgatggtgtatttggcgatgtagcgtttgacgcggaagttgtcgttgcccgcaccatcgccaggcagggcgccgcgctgttttttcatcttgtcggcggtctgccaggtgcgcgtgatcacctcgccgacgcggcccatggcctggctgtcggagctgatcatggagaacgcacccaggtcatgcaggatgtcttcggcggcgatggtttcacggcggatgcggctttcggcgaacgccacgtcttcggcgatgctcgggtccaggtgatggcagaccatcaacatgtccaggtgttcgtcgatggtattgcgggtgaacggtcgcgttgggttggtggaactgggcagcacgttggcaaaaccacaggccttgatgatgtccggcgcatggccgccaccggcgccttcggtgtggtaagtgtgaatggtgcggcccttgaacgctgcaagggtggcctcgacgaagccggattcgttgagggtgtcgctgtggatcgccacctgcacgtcgtactcgtcggccacgctcaggcagttgtcgatactggcgggggtagtgccccagtcttcgtgcaacttcaagccgatggcgccggccttgacctgctcgatcaagggttccggcaggctggcgttgcccttgccggtgaagccgatgttcatcgggaacgaatcgctggcttgcagcatgcgcgccagatgccacgggcctgaggtgcaggtggtggcgttggtgccggtggccggtcccgtgccgccgccgatcatgctggtgacgccgctgttcagcgcctcttcgatttgctgcgggcaaatgaagtgaatatgcgtgtcgatgccaccggcggtgaggatcatgccttcaccggcgatcacttcggtgctggcgccaatggccatggtcacgccgggctggatatccgggttgccggccttgccgatggcgtggatgcggccgttcttcaagccgacgtcggccttgacgatgccccagtggtcgatgatcagggcgttggtgatcagcgtgtcgaccacttcatgggcgagcaactggctctggccctggccatcgcggatgaccttgccgccaccgaatttcacttcttcgccgtagacggtgaagtcctgttcgacttcgatgaacagctcggtgtcggccaggcggaccttgtcaccgacggtggggccgtacatgtcggcgtaggcttggcggctgattttcatgtggttgccctgaagatatgtgttgaatgtgagatcgctatcgggggcaagccccctcccaccttgatgtgtgaacgcggtcaaaatgtgggagggggcttgcccccgataaggccctaaagatcacccatgatccgacctgcaaacccgaatacccgcctgccaccactcaaatccaccaactcgacctcgcgactctgccccggctcgaaccgcaccgccgtacccgccggaatattcaggcgcatgccacggctcgccgcacgatcgaatgtcagcgcgtcattggtctcgaaaaaatggtaatgcgagcccacctgaatcggtcggtcgccactgttggccacgctgagagtgacggtgcgccggccgacgttgagttcgatgtcgccaggctggatccggtattcgccaggaatcatgcaggttgccccagtgtcttgaagtagatggcggtcgggctgtagcgcccgtccgggctttggcagtagtcgggcagttcgccgatcttggtgtagcgcagcgactggtagaaggcttcggccggggagccggcttcggtgtccaggtacagcaggccgcgcttgtgctggcgtgcggcgagctccagggtgtgcatcagttgctggcccaacccatggcgccgtgcattgctgtgtaccagcagcttttgcacttcggcgcggttgaggccgttggctttctggcacagcgccaattgcacactggcgatcacctgctcgtcgcgcaccaccacccacagcagcaggctggcgtcttcgatgctcgcctgcactgtgcccagataagcccgcgcctgggcctcatcgaagtccgccatgaagccgaccgaagcgccatgcctgaccgcgtccagcaacagctcgatcaagcccaggcggtaatgggcaaaactttcagcattgactcgacgcagctgcgcggcgttcatcgatctcactccttgggcggttcggcgcccgggttcaaggccagttgcatgaaggtcaggtccagccagcggccgaacttgatacccacctgcggcatttgcccggtggtgacgaagcccaggcgctcatgcaggtggaccgaggcctggttgccgctttcgatggcggcgaccatcacgtgtttgccgcactcacgcgcacgttcgatcaacgcttgcatcagccgtgggccgaggcctttgccgcgctggtcgttacgcacgtacaccgagtgctcgacgctgtagcggaaaccttcgaagggacgccagtcgccgaacgatgcatacccggtgacttcatcgttttccaccgagaccaggatcggataaccctgggcatgccgcgcactgaaccaggcctggcggttgcccaggtccaccggttgttcgttccagatcgccgtggtgttcagcaccgcatcgttgtagatgtcgcggatcgccggcaggtcgttttgggttgcatcacgaatcatgaccaggcctcacgcgatgggttggtgaacggtgaccagtttggtgccgtcgggaaaagtggcttccacctggatgtccgggatcatttccgggatgccttccatcacctgttcgcggctgagcagggtggtgccgtaatgtatcaggtcggccacggtgcggccgtcacgggcgccttccatcagtgcggcggagatataggcgatggtttccgggtagttgagcttcaccccgcgcgccagccggcgttcggccaccaggcctgcggtgaagatcagcagtttgtctttttcccgtggggtcaggtccatggttcaggtgctccagattcgtggtgaaacggcttcccggcccagcaccgccgggcgcaacaggcgccataaatcgatcagccatgcgcgcgccagcagcgcttcactggccaggcagcgggcgaccagcaagcccggcaattgggtcaggtcgccgcgcacggcgtggggcagggcgcggcaggtttccagcagttcgggttcgatatcgccggtgagcagcaacgtcgcgaacactggctggccgtccagcccgatgggcgactccagcaagccgtcggcgcccacaatgcgctggcgttcatgccagagcaactggccgtcgcggcggatatccagctgtgattgaaaatgccccagagcaaagcgttcaccgctggccggtcgacccagggcaaccacgtcccagtaaaacagacgggcatcgccctgcaggtcgatgcgcgtggtgagttcggcctgggccgcgctgaacacgatggtttcctggggcagccactccagcgtggcaccggcctcaacgctcaattcgagttgctggaacgcagggcctttggcgcgataccacttggcggcaccggggctggtcagttgggcccaggccccttcggcgacatgggcacggatatccaggcggtcaccaccggcaatcccgccgggcgggtgcacgatgatgtgctggcacacctcggggccttcggcgtacaggtgcttttgcacccgcagcgggccctggtggcggcgcattgtcgggcgcgtggtatcaccgaagcgcgcatagccgagttccagctcggcatgccagctgggggtgaacagtgcggtggaggcgggcaggttcatggtgagtgcttgaggtcttttttaaacagcttttccctaggtgtagcaaaggacgtgccggggtgaaacacggattagaggtcggtcctgatggaggcgtgcactgttgtggtgctgtgccgtcttgagcgatttattcaatgcgctgttgtggtgcgctcggccagatatagttaggccccttcagggagggcgggagcgttagatgggcgtttcttcctcgacccttcccgaaggtgctgcacgatggacatccatgacatgccacaacccgatggtgttcggcaaaaccccgtctcagatgggcaactgcctgccctcagcccaccctttatcagcgccgatgatgcggcgtattgggcccatacccaaataggcagcaagcgcgaacgcgagtacggcggtgcgattctcaagcacgcaggccagtatttcgcgacagtgcccaagcagggtgcgaccaagcaaatagcgctcgatagcgtgatcccgatcaaggatggcaagccgatcttgccggcggattacacctgctccgggttttaccactcccatcctgataccgatgatgactttccctcaaggatgttcccggccaggcagcgttcaattctgcgcggcttgttttcttaccccgacatgcaggtcatttttcgcttgagcggtcatgtaccggcgcattatctgtcggggccagatggcactttgttgaaatttgtcgtgcgaacccaggcaaagttgcaggcgtttctgacccggctggaccccgccatccaccctgagatcgactttttcacggactatgtgccggaggtggccgaggccggcgcactgtgggtactggtgcccaacgctgcctggggcggtgtgcgcgggcgggtcagcaaggactgggtgctcaaggagtgggtgaagaacacgcccttgaagggcggcgagcggatgcaaccgttctcttccgctgtctttgcattctcacaactgtcagcgctgattgcctttacggacgaggcgtttgaccagccactctgggggtatctgctcaaggccgcaggccgcgatgaatacgtctatgtgcctggcgagggtaccttggatgaatgggggccgccgcacaccctattcccgcgtgacgccaacggtcagacgcaactgccgccaggctttctgatcgagggcgtcttgatgcacctggtcgataaaaccaggccaccttttttacccgcgcacctggcgagcctgatcgaggtgttggcggacgctcccgctctctttgaccccctgcgcccgccgaccctgtcgcagcggctccccgatggcggcttgaacagttacaggctctcgggcacggatgccgagtcgtcgttgctgggcaagggcggggcgatcgcacaacggcagatcgagaccggcgcgctcacggtgttccgttaccttgaccggttggctagcatgggcgagatggcggtcttgaaggcgggggtgatttggccacgcattggaaaaatacagccgtggtttgaagagttacggccccacttcagcccggattttctcaggcccaatgacgctgcccgctacctctgtgagcaagtattgcggcgtgatatctctcattttggctacatcctgcagcgcaatgacggtaagttcgtggcaaccggactgatcgccgatatcaaccggctggtgggtatggggatgtcgaaaggtagcgttctcgacgtcctgacgttgccggcagattatcgctattacggttttttcgttgccgttggcagcaacccggaagaactgaaacggatgctggcctcccatccggacgttgaaggaaggcgctcgctggatgagcgtctgctgttgacgctgacgattccctatcggaattatgtcgccagcctgacggcggatggtcagcccattccttgcctttactattcgggtacggcgggttcactggtcaagtatgtgagcagcggcagcccacaagagcgcgagtttcatacggcgctgacagcgatcatcgacaccggtatcttcaagccccgcatggatggtttccgtggcacgcccctgcaagtcgtcagcaagatggcaagcctgggtgagttccatgtcatcgagacgaacgcggtcttcggcaactcccgtggcaggctgcctgtgacatggaacgcatttgagtcgtttgtctccgtgtctcctgtcgaaccgccgtacaactggatcgtacctttcccggaactggccgctgaagtggcgcacgggcagttcggcctcaagccgcagctgcgacaagtcgcgtttattttgaaagctaccggagcccaagcgtacttctcgacgcagcctgcgcccatcggcagccggatgttttcaccgtcatcggtttttacccaggatgccaacggtgatccgctgatacccgaggggtatgaggtccacggaatttgctaccagtcgctgcccggtactgggatgaaaacccttcaacactggttgtacgaaagctttgtcgcgccccaggacctggcggctgcaatcgcccaggcccgagagtcgaaccgtacgctgcgtgcgctctacttgagcacgcgtgacggtgcgcaattgcaataccgcttcagcgggacggggttggagagccagttgtatggcgtcacacctaccggggaggtcaacgataatggccatcaggcgagtttgcgctccggagccgtgacgcctacggagtatgtactgcgggtggcggcggcgggcgagttgtcggtgttggtggccggcaagctgtgggacatccagggccgcgtggaaccaacctggcggccctttgcgcgctaccgcatgccggagttcagtgcgccgtttctgcaggccgatgatgccgcacggtttgcccatgaacaggtgggtgccgatcgttatgctgaatactgcggttgcatcctcaagacacccgaccagcgttttgtcgccacgctgccggtggcctgtctggaggcgcagcggtttgccatcggcacggtgtttccggcggaccacaacggtgtgttgctggtccccgagccctacgtgctctacgggcaatacgcgtcatgccggtcggttacccggctggacaagacccgcatgcagcgcaacggctggtcacgggaggaggccagtgtcgattggcaactgttcagcgatgccgatctgcgcaacctcatcggcaaccggcactgggtctccaccggctacctctcctgcgatgaggacggcctgattgcctttgaccttacgggcgccaaggcccaattggatgaattgaacccggacacctcctcggcgccccgcgaaccgcaggcccgggtgcggcacttgtcggccagcggcttgcgcattgtgctcggcagtccgttgtggggattgcctggcagtgtctcgccaacctggcgtgcctatgcgccggcggcaacctttgaaaaaccgcagcaggtggcgtttggcgcagtgttttccactgccagggaagcggttgcagacgctcacaagcgattgcgccggggctattacgcggcccagacgggttttgcttttttgctcaagcacgcgcaaaaggaccagtacgtgctgagccagcttgtccctgcggatggcgccaatccgttgttcaacctggcgagtctgtttggtaaccgcgatgacggtgcgttcatttttccccaggcatttgaattgcacgggttgtattacgcgcgcctgtggatgcccgacaacctgcagaatccgcagcgttggctggctcggcacttcctgtcttcggccgacctgtacagcgccttcctgtccgcccggcgttggcgtgatacgggtagcagcgtgaccttacccgtgtttatttcaaccctggacaacgccgtgctcgagtaccagacggctgtctcgacgccgttgttcgacccggaaaaacaggcgtccggcacctttgaagacgtgcatacccaactgagcggaggccagctatcaccccaggcatttgttagaaaagtcatcggcacgagctggctcggtgtgctggtgcccagtgaatgctgggacgaggagagcagcaggctgggcgccgactggctgccttatgccgacttcagtcgcagggcgttgagcccggcgttctttcaccaggcggatgcgctgcgctacgcccaccagcgcctgggcaatcgccgcgacagggtgtacggcggcttgctgctcaagcgcgtcgacggcctgtttgtcgccaccgagccgctgcccgtcgcgacagagaacttcgatcccaaatggatcctgccggatgaagacgtgcgtgcggactggttggcgccgggcatgacgctggtggcgcgctaccgttcgcggcgggacgtactgcccagcttggtgctggacgaggacggcgaggcggtctatcgagcgatgttgtccaccgatgtgctgggcacggcgctcacgtgccagcacctgtggagccatgagtacctgttcgggctggatggctcggtgatcggtttcagttgcaaaagcgcaacggacgcgacccagcaaggcccgctttccaacgaccttgaagcgctccggcaagcgctggcaccggctgagcaaacgcctcacgacccgctgagcaacgcgctcgagaagcagatgcgcgacggtagcctcacgcctgtggcgttcgtcaatcggctgctcaaggtcgcctcgatgaccgtggtgcaaggcagtgcgctatggggcaatgctcaggtgctgggcagcggatggctgcctgcgcgtggttttaccgcgcctgaccggttcatccatgccacggccgatcgcgccttggggccggtgttcagtcatatcgatgacgccgcgcgcaacgcccatgaaagcgccggagagcgagaccggctgacctacggttttatcttcaagttggccaatggtcactggatggccagcctaccggtggacggtgaagaccgacgtttcccctacgacagggtgttgctgggcgggcgtttgccggtgggctgtacggtggcggcgctctatctgtgcgccccggctcgtcagccgcaagagttgcgcgcatcagcggtctatcacgccttcatcccgccgagtctgttgcgtgcagcgttggcggtggtgcgtacgaaaacaaatgccggggctgcgccttatctgccgttgtacctgtcctgcgccgacagcgccctgctcaaataccgtgcctcacgcctggacagtaactgggacgaagagtcgcagttgcaggcctatatccgcacgttgaatgggcacttcaaccctcacgactacattcgccaggtcgctcgtgccgggcagctcgaggtgctggtgacgggggcgatctgggccggccaagggccggtgtcacagtcctggcgtgaacgtgcgccagctgcggtcgccgcagacccggatgcgcgggtggtgctcgggccgctgttttctcatccggatgatgccgcgcggtatatgtggcgccgctcaccggctgttccaggcaaggcgagcatgggggctgtcctgaaaaatgcagcgggcaacagctatctcgccagtgagccggtggacgacagcgggccgagtgtccacgtggggctacgtatgaatacgagtgcttatcgacgcctgttcggctgggtgatgaacctggatgaacgcactcaaccgcgtcccaaataccctgcgggttaccgcgtcatgggcgtacagcaactgcacaagtgggaggccaatccggagcggctggctgaccgacatgaacaagctatcgccgaaaactttatctcgcagaaggagttcaggtttgtggtcgacatgttaaggcaggataaagtggctggcgcccgctactacttcactcccagaaatggcgccctgttggtctacgcgcccagtttcgagcgcgtcgagcacgacctgctgctgtctggctggatcgaccccgaatcggacaaaccccggctcaagaccagcgaagccctcacggtcttgttcaattccggtcggttgcatgtgttggagcccgaccgtttctggcaacccaaggggcatgtcgcatcgcgttttctgatggagttgcgcaaagcgcagcagactcgactcagatcgtgacgaggccacgcacaccctcgctttccatgtgctcgccacggccctgctgcacgatttcgccccgggacatcaccaggtactggtcggccagttcggcggcgaaatcgtagaactgctccaccagcaggatcgccatgtcgccgcgtgcggcgagcttctggatcaccgcgccgatttccttgatcaccgagggctggatgccttcggtgggctcgtcgaggatcagcaggcgcgggcggctggccaaggcccggccgatggcaagttgttgctgctggccgccggacaggtcgccgccgcgtcggtgtttcatttgcagcaacaccgggaacaactcgtagatgaaggccgggacttccttggcctccttcgcgccaaagcgtgacagccccatcaacaggttttcttccacggtcagccggccgaagatttctcggccctggggcacgtacgcgatgccggcatgcacccgctggtgcggcttgaacgcggtgatggcctggccttcccaggtcaccgcgccttccttggccggcaacaggcccatcaggcacttgagcaaggtggtcttgcccacgccattgcgcccgagcaggcaggtgacttcgccgatcttcacgtcaaaggacagcccgcgcaggatgtggctaccgccgtagtattggtgcagcttgtcgacttgcagcattctcaaacctccttagatcccacataaagcaagccagtgtcctggtcagcgaccgaggtaaacctcgatcacccgctcgttttcctgcacctgctccagcgacccttcggccagcacgctgccctggtgcagcacggtcacgtggtcggcaatcgagccgacaaaccccatgtcgtgctccaccaccatcagcgaatgcttgcccgccaggcgcttgaacagttcggcggtgaactcggtctcggcgtcggtcatccccgccaccggttcgtccagcagcaacaattgcgggtcctgcatcagcagcatgccgatttccaggaactgcttctggccgtgggacagcaacccggcctggcgcggtgcggaggcggtcaggcggatggtgtcgagcacttcatcgatacggtctttctgttcgccactcaggcgtgcgcgcaggctggcccacaccgatttgtcggtcttctgcgccagttccaggttttcgaacacgctgagggcttcgaacaccgtgggcttctggaacttgcggccgatgccggcctgggcgatctgcacttcgctcatgccggtcaggtcgaggttttcgccaaaccaggcggtgccgtggctggggcgggtcttgccggtgatcacgtccatcagcgtggtcttgcccgcgccgttggggccgatgatgcagcgcagttcgccgacgccgatgtacaggttcaggtcgttgagggccttgaagccatcaaagctcacgctgatgtcttccagggtcaggatggtaccgtggcgggtgttcaggcccttgccggccgcctggccaaggccgatggcatcgcggccgctgcccgcatcgaaaatgggttccagcatgacgttcctcatttcttcaacaggccgataacgcccttgggcaggtacagggtgacgaggatgaacagcgccccgaggaagaacagccagtattccgggaaggccacggtgaaccagctcttcatgccgttgaccacgccggcgccgagcaacgggccgatcagcgtgccgcgcccgcccagggccacccacacggcggcttcgatggagttggtcggcgacatttcgctggggttgataatgcccacctgcggcacatacaacgccccggccaaaccacacaacaccgcgctcaacacccacacgaacagcttgaaaccacgcgggtcgtagccacagaacatcaggcggttctcggcgtcgcgcagcgcagtcagtacccggccgaacttgctctgcgccaggcgccagccgatgtacaggcttgccaccagcaaggcgacggtggcgacaaacagcaccgcccgcgtgcccggctcggtaatgccaaacccgaggatgctgcggaagttggtgaagccgttgttgccgccaaagccggtctcgttgcggaagaacagcagcatgccggcaaacgtcagggcctgggtcatgatcgagaaatacacgcccttgatccgcgaacggaaggcgaagaagccgaacaccagcgccagcaaccccggcgcgagcaccaccaggcacaaggcccagaggaaatgctcagtgcccacccagtaccacggcagttcggtccacgacaggaaggtcatgaacgccggtaactcatcgccggaggcctggcgcatcaggtacatgcccatggcataaccgcccagcgcaaagaacaggccgtggcccagggacaacatgcccgcgtagccccacaccaggtcgagggcgagggcgacgatggcgtagcagaggatcttgccgaccagggtcaaggtgtaggccgagatgtgaaagagattgtccggcggcaacagtgacagcaacggcagcgcgagcagtaccgcgaggatcaccacgccgagggcaatcgtcagcttggggccggccttttgcgtggccgtgagcatcaatggctggttcatcagtcgatcacccgtcctttcagtgcgaagagtccctgcgggcgtttctggataaacagaatgatcagcgcgaggatcaggatcttgccgagcacggcaccgatctgcggttccaggattttattggcgatgcccaggccgaacgccgccgtgacgctgccggccaactggccgacaccgccgagcaccaccaccaggaacgagtcgatgatgtagctctggcccaggtccgggccgacgttgccgatctggctcaaggcgacgccgcccaggcctgcaatgcccgagcccaggccaaacgcgagcatgtccacgcgcccggtgggtacgccgcagcaggcggccatgttgcggttctgggtcacggcgcgcacgttgagacccaggcgggtcttgttcagcagcagccaggtcagcagcaccacgcacagcgcgaaggcgatgatcacgatgcggttgtacggcagcaccaggttaggcagcacctggatcccgccggacagccacgccgggttggacacctcgacgttctgcgcgccgaacaccaggcgcaccagctggatcagcatcaggctgatgccccaggtggccagcagggtttccagggggcggccgtagaggtgacggatcaccgtgcgctccagggccatgccgatggcggcggtgacgaaaaacgccaccggcagcgcgaccagcgggtaaaactcgatggccgccggtacgtagcgctgcatcagcagttgcaccacgtaggtggagtaggcaccgagcatcagcatctcgccgtgggccatgttgatcacgccgagcagaccgaaggtgatcgccaggcccagggccgcgagcaacaggatcgaacccagggacatgccgctgaaggcttgcccgagcagctcgccgatcatcagtttgcgcttgacctgggccaggctggtttcggcggcggtgtgcacggcggcatcgctttcgacgcccggtgcaagcagggcttccaggcgcgtacgggccagcgggtcgccggtattgcccagcaaacgcacggcattcaggcgaatggccgggtcggtgtcgaccagttgcaggttggccagggccaggctgagggcgctgtgaacttgctcattggtttcggtggcgacctgttggtcgaggaatttcaactgcgcgggttgtgcgcttttctgcaaggtcttcgcggccgccagacgcaccttggggtcggcggcgagcagttgctggctggcctgcacgttatcgatcagaccgcgcaggcggttgttcaggcgcacggttttggtctcaccgttgacggtgagttgaccttgttgcagggcgtccaccaactcgatgcgcgccgggtcaggctgggcggcccagtcctggagcagcttggcttgttgcgtcgggttggcggccaggaagtcttcggcgtcgctggcgtgtgcggccaaaggcagcaacagcagggccgtgaggatgaaacggtacagggcagtaggcataacaaaatgtcctgatcatgcgcggacaagcttgatgtgggagggggcttgcccccgatggcggtgggtcagtcagcccatgcagagcctgacactcagctatcgggggcaagtcccctcccacatttttatctgcgcttggggcttagttacttttcaccgcatagtccggcttcttgtcattgccaggaatgtacgggctccacggttgtgcgcggatcggttcctgggtctgccacaccaccgagaactgcccatcggcctggatctcgccgatcatcaccggcttgtgcaggtggtggttggtcttgtccatggtcagagtgaagcccgacggcgcggcgaaggtctggccggccagggcttcgcgtactttgtcgacatcggtggacttggctttctcggccgcctgcgcccacatgtggatgcccacgtaggtggcttccatcgggtcgttggtcacggctttgtccgcgcccggcaggttgtgttgcttggcgtaggctttccagtcggcgacgaacttcttgttcaccgggttctccaccgactggaagtagttccaggccgcgaggttgcccaccagtggcttggtgtcgatgccgcgcaattcttcttcgcccacggagaacgccaccaccggtacatcggtagccttcaagccctggttggccagctctttgtagaacggcacgttggagtcgccgttcacggtggagatcaccgcggttttgccgccggcggagaacttcttgatgttggcaacgatggtctggtagtcgctgtgcccgaacggcgtgtagacctcttcgatgtctttatccgcgacgcccttggaatgcaggaacgagcgcaggatcttgttggtggtgcgcgggtacacgtagtcggtgccgagcaggaagaaacgcttggccgcgccgccttcttcgctcatcaggtactccaccgccgggatcgcctgctggttgggcgccgcaccggtgtagaacacgttcggcgacatctcttcgccttcgtattgcaccgggtagaacagcaggccgttgagttcttcgaacaccggcaacaccgatttgcgcgacaccgaggtccagcagccgaacaccacggcgaccttgtcctgggtcagcaactggcggcctttctcggcgaacagcggccagttggacgccgggtcgaccaccaccggttcgagcatcttgccgttcacgccgcccttggcgttgatctcgtcgatggtcatcagcgccatgtccttgagggacgtttcggaaatggccatggtcccggacagcgagtgcaggatgccgaccttgatggtctcggcggcctggagggtccagctcatgcccatggcggcaatggatgccgacagtgtgaaagccttgatcaagctgcgacgcttcatggtgcgatctccgtgtacccaagtgttgttgttggacagatgcaagggcgattgcaaaggctgtgcccgctttgacgggagtgctgtccagggctgtatccgggcggggggctacgcaggccgcactgaaacggcgccgtagcagctgggtggtgcggggcgggcattgttttggtgcgcggcgccgcttaactatttagcgcccggcgaatggggcgcgggaggatggtgggcacttcgattctgccaggagctgttcacatggacgaccaacccacgcgcccgcaacgcgctgcacttgcacggggccacgccaaactgagcaggctgaccccggcgttcatcagcaccgacgatctggtgcgctaccttcatgaacgcatggccccacggttgcagctggaacatgccagcgtgctgctgcaacgcttgtccgacggcctgtatctggccaatgaaccgattcccgaccggcccacggtgttcaactggaacctgctgctggatgtcgatccggtcagccaggactttatggaccctgaaggttttcgaattgtcggtggctggcatgcacacacgaacatgaccgattgggtcaaacgagaaaacccctcgtggacggcagatgaagtcaccgcgttccaggggttttattccgagccggacatcatcatcattttccaggaccgccatcaattcaaggtcgtctacctgtccggccccgatggcacactgcttaagttcgaacccgatgattccacctccggcgcggactacgcccgttggctacgcaaccgtggcggctttgattcgccccatgcccacagcggcaccctcgcggggtattaccagaagctggcgtcgctcgggcgcttgaccttcctggcatctattcccgcctggggcggttcggtgggcgcggtgcccgctgattggcaaccacgcaaacccttcaaggctccagcgctggcgttgccttgcagcccggtgttcatggacaagcagcaagcgctctcccatgcgtggtcgcgcatccagcgcaggccaaacgccaggcagcacgtattgatcctgcagcgtgatgggcatgagcattacctggctggggagccagaacgggaggcctctgtcggcgggcaactgcctttactgcccgcaggttgccacctgcacggcatctactttcactcccgacccttgccgggcctgtaccccgatcaggaagcctggctgttcaagcatttcgtcagccccctggagttggcgcagcgcatcgcgcaatttcgccagtacagccgtggtgtgcagtccaccctcggcgcatcactgtatatccgtgtgcgcgatgaagcgatcttgcgttatcgcttctccggctcagccgccgaatcccggttgttcacccaggccgccgacggcacggtagaggccgatgagctccagtccaaactgcactcgggcgtgttgctgacccgcgattttgtccggcaagtggccagggccggtgagttgacggtggagaaaaccagcgcgttgtgggaccgcagcggtgcggtggacgacacgtggacgccttattcgcaggttgtcttgccggcattgagcgcggcatttctcaccgccgacgacgcggcgctccatgcccaccggcgtatcggcaggcgccgcgagcaggggctcggcgggctgatcctcaagcgcggcgatggtcgcttcgtggtgaccgagccgctgccagccgggccacgcccatttgccttcgccggtgggtacccggtggaccggcagaaacagccgatcattctgcatcccgaccaccatttgcatgggcgctacgcttcgcgcacggcgctgtcgctgaccgacccggcccaggcggtcgagcgcaaatggacccgccaggacaccgagctgaatgcgcagatgttcctggcagacgacgttgccgatctgttggcaaccgggcaagtcggctacctgtcgggtaccgaggactgcctgctggccctggccccttcgaccaccactctggcgtggcgcaagcaatggtccagcgagacggcgggcatgcgcagtgcaatcaaccagcgcctggaagagggcaaggtcaagcctgccgatgttgtacggaccctggccgaagcgggaacgctgcgtattgtgctcggcaatgcgttgtggggcccagccggtttcgtcgaggtggactggggcccttgggtgcgggcgctgacgttccagcgccccgcgaccgtcagccacgggccgatcttcgaaagcgccgatgcggccgcgcgcgaacgacaccgacacgccgcccattactacggtgacgatcatgtcagccgttattttgcgttcgtcctcaagcatcgccagcgcgaagaatatgtcgccagcgagttggtcccggtaacccgccagtcggcgctgctgtccttcacccggttgtacggcggtgcactgcccgagggcttcgactgccacagcctgtactacaacaaaccctgggtcggcaacggcacccgtggctggctgcaacggtttttcatcgaaccggaagacttgagcgaggcgctgtttcaggctcgcgtcaatgcgttgttgtcgcccctcggtgcgccggtgtacatcgcggtgccggacggtgcgctgctgcgttatcagtcgccgtccacccaaggcctgttcgaaaccaacagcatcggggacagcgcggcgacggtgcgcgccaagctcaatgtcggcaccctgacgccgttgcagtttgtgcgcaatgttgcgatttccggtcgcctggaggtcgtccaggccagcccctgctgggaccgcgaaggcacggtcacggggctgtggacgccctacgcgcagttgctgcggcggcgcctgagcccggcgtttgtgtcgatggacgatgccgcgctgtacgtgcgtcgccgtgtgccgacgagcatcgaacacccctacggcgggctgatcctgcggcgcgaagacggctggtttttcgccaccgaacctttgcgggtccccgatgacagcttcgacctgaaatggatcttccccgacgaattggcctcccgtggcgagcatccgccgcgcactgtgccggtggccagttactacgcaaggccggcggaacagtggccgttcatgctgtcgcccacgcagtcgcaggtgtacggcaacctgttttccacccgtgcgctggcgcaggtgttcctgaccgagcgggcgcgcatgcatcactactggctggccgccgatggcgcgttgcttcgtttgaacacgcgtcccgaggaaaaagcgccgcttgtgaccatcgccgacctggtgacacgcccgcgcaatccccatgactggctcaacggtcggctcgaacgcatgctgcgcgagggcgagttgacgcccaccgcgtacgtcaaccgcattgcccagaccttcgccttgcacgtggtcagaggcagcgcgctgtggggcagcccaggcccggtacgcggctggcaaccctttgcgcctgtgccgccggccaacggtgcctatgtgcaggcgttccacgatccggcgtgcagcccggtgcatgtgcaggccgatgacgctgtgcgctacgcccatgaactcgcgggggcgcgtggcgaattgcagttcggctatgtgctggaatcgatcagcaacgggcatttcatcgcgaccctgccgatcactgacgccggcgccaacctggcgcatcggcgggtattcagtgatgccggttaccctcatcgctatgccttgggcggcctgtacctgtgtgcaccgcaggtgtccgaggtggtgccgagcgcgcccgcacaggcaggcgacggcgtctatcaagggctgtttttgccgtcccggctgatcgaggcgatgtaccaggtaacgaccacacaggaacgccctgcgttgcctctttacctgtcgtgcgcggatggggctctgctgcggttcgtggtgcgcgaccctcggtttatcgggtatggcgatgatgtgaagctgcgcctgcggctgctcaccccacgtgacttcatccggcgcatggcggcggccggcgagctacggatcctggtgcccagcgagcattggccggggaccggtatcgtcggcgcagactggcagccgggacgctctcgtggggtcgaaccggcgggcgacaactaccgcgcattggggccggtccatgcgcatcaagatgacgcggcggggttcgtccacgctcgcgccgggcgtttcacggggcaacaggcgatcagcgcgttgctggagagcggcggggtgatgggcaagcatgtaccggtgctggagctgccggaccatggtttcccttcggcgacggcagcgcggttatttgtgacggggccgtggcccgcaggcttgcaggtgcgggcggcgcatctgctgttccatgccgggctggatcagccgcagatgggcgtcgagcacttgtatggcgagtacttcgtgagctttcgtgaactggcgtactacattcattcgctcaaacagcagggcctggcgatcaacgggttttacctcaccgcccgggacggtgccttgctcggttatgcgccgcgcttcgaccaggccgagtacaacctgctggcaaccaccggcaaatggagcgccgaaggcggctacacgaggttcgcgccagacccctcacacgtgttggccgaactggcgcgcaccggccggttgcgggtactgcacagtggtgagttctggaccctgcgcggcgcgctgggcatggacctgaagctgcccggcagccccggcgggcgaccgtccagggacgaactctgaggcggtcagcgccggcgcatcaaaccgatgaagaacaatccgccaatcgccgccgtggccacgccgatgggcaggtcttcgggggcgatgagggtgcgtgcggccacgtcgacccacaccaggaacaagctgcccagcagcgcgcacaccggcagcaggcggcgatgctcggcaccgacgagacgtcgggcaatgtgcggcaccatcagcccgacaaaaccgatggagccgctgatggagaccagcacaccggtcatcaatgaggccaccaggaacaccttcagccgcacggtacgggcgttcaggccgagggtcacggcggtctgctcgccggccatcagcgcgttcaacgggcgcgccatgcccagcagcaccagcagccccagcagtaccgtcaacgccggaatcgccagcagctcccagcgcgccaggccgaggccgccgagcatccagaacatcaccgccgaggcggcgcgatggtcacccatgaacagcagcagattggccgccgccatcatcacaaacgacaccgccacaccgcacagcaacaggcgatcgctttccagccggccgttacgactggctacggccaacaccaccagcatgctcgccaatgctccgataaacgcggcgatgggcagggtcagcaggccgatgacttcgcccacatgcagcaccacgattaccgcgcccagggtggcgccggacgtgacgccgagcaggtgcggatcagccaacgggttgcgcgtgaccgcctgcaacactgcgccgatcaacgccagcccggcgcccaccagtgcgccgagcagcatgcgcggcacgcggatcagccacacgatatgttcctgcccggccggccaattcacttcaccgatgccgagcgccttgtacagcaggattcgccacaccacgtccaccggcacccgtgccgggccgaagcccagcgacaggacgcaggagaccagcagcaccgcgccaagcgcggcgagcagcagcccatagcgacgggtgatcattcgccgtggaaccccttggccagggtttccaccgccagcacgttgtcgatacccggcgtggcctgcacgtaagggatcacgataaagcgctggttgcggatcgcatccaccgcttgcagcgccgggttgtcgagcaggaattgctctttctgttcggcagtgacttcgctgtagtcgacgatcacgatcacctgcgggttgcgctccaccacggtctcccagttgacgcgggtccaactggcctcgatgtcatcgagaatgttgcgcccgcccgccgcgtcgatcagcgcctggggcatgcccaggcggccggaggtcatggcgcggtcttcaccgctgtcgtagaggaacacccggggcttgtcggcgggcaggtctttttgtacctcggcgacctgcgcctgcatctgcgcgatcaaggcattggcgcggtcctgcacatcgaagatcttgcccaggttgcgcaggtcgttataggtgtcttccagagtcgcagccgggcgcttcatcacgaaggcacaggattcggtcagctcatacacgttgatgcccaagggttgcagcgtgcttggtgtgaggtcgccgcccacacgcatgccgtagtcccagccggcgaagaagaaatccacgttggcgttgagcagggtttccaccgaagggtacttgctcgccagctccggcaggccgtcgagcagcccggccatttccggggtgaccgacttccagccggtgacgccgctgtaaccggccatgctcggcttgaggccgagggcgagcatcatctgggtcatgttgatgtcgtggctcaccgcgtgtttcggcgcttcctggaaggtcacgtcgcggttgcagctcttgatggtaaccgggtagtgggtcgctgcggcgagtgccccggcggtattgaacagcaaggtaatggcaagcagcgaacgcaggatcatggttgggttatccaggtgattcgggggtagccggacagcgggtgggtatcgatcaacgcctcgacgccaaacacatcgcgcagcagttcgcgggtcagcacctcatggggcgtgccgttggcgacgatgcgcccgtggttgatcacgtacaggcgatcgcagaaggcggcggccaggttgaggtcgtgaatgctcgccagggtaccgatgtgcaggcgcttgaccaagcgcaacagctccagttggtaacgcgggtcgaggtgattggtcggctcgtcgaggatcagcaattgcggctgctgggccagggcccgggccaggatcacacgttgtttttcgccgccggagagagtggcgaaggcgtggtcctcgaagccttgcatgccgacggatgccagcacctgctggatcaactgccggtcgtgcagcgtgtcgccgtcgaacaggcccttgtgcggcgtacggcccatggcgaccacttcatcgacgcgcaggccgaaggcatccgggaactcctgcaacaccacggcgatgcgttgcgcgcaccacttcgaactctgtttccacacgttctgatggtcgagcaacacgtcgccctgcgccggtttgctgaaccggtaggcgcagcgcaacaggctggtcttgccactgccgttaggcccgatcaggccgacgaactctcccgcaccgacctgcaggctggcgtcacgcagctggaaccggtgatggcagtggtcatgccccggcggggtccaggccaggtcggtgagggtgagtgcggtcatcagaaggtgtagtccgccgtgacaaagaacgagcgtggttcaccgaggatccactgctggccgtcgttgtattggctgacggcataggtgcggtcgaacaggttgttcaactgcaggcccagggtggtgttgcgcagggctttccacgatacggtggcatcgaccacggtgtagctgggcaactcgttctggttggccatgtcggcatagcgtgcatccacataacgcacaccggcgccggcgcggacattgtcggtcaccgccttgctcaaccacaggttggcggtgcggcgcggcacgtccaccgggcggttgccgtcgcgggagacttgcacgccgttgacgtcctgtttgaagtcgtcgtattgcgcatgcacgatggccgcgttggcttgcagttgccaggcgtgtggcagttgcaggtcgaggctggcttccaggccacgggaggattgctggccgacttgctgctgcaggctcgggttgcccggcacgtcggtgagcagtttctttttgacgatgtggtaggcggccaacgtccattcaccgcgctggtcccagaaggcttgcttgatgccgatttcagtctgcttggcggtggacaggtcgaactgctgctggccctggctcagggaaatcaggccaccgacgccgtcggtgctggtggcgtactggccgtagaccgaggtgtcgggcgtgatcgcgtagaccaggccggccttccagttattgccggtaagggtcttgtcggactggctgccggtgcgcagttcttcgcggtcgatgtgcgcgtagtcgcggcgcaggccggtgatcagcgacagttggtcggtgagttgcaggcggttttccgcaaagccggcaacggttttggtggtggtggcgaacagcggcttgaacgggtcgttgctggcgaactggcccggggcggggtggttcacgtcgatgggttggccgctggcaaaggtgtcggtaaacggcgagttgctggccaggcggaagcggatacggttgtattccacgccggtcacggtctggctgtcgaggccgaacaggctgtgcttgaaggtgaaggtctggcggtcgccgacctgttcctggttgtgcttgatgccgtagttgccgctgcgggtcagttggccgccggtgaagttgtagttctcggcgttctgccagcgacgctggtttttcaggtaatacagctcgttggtggcgctgacgttgtcgttgatctgccactcgctggtcaggcgcgtccactggtcgttgtagtgctgggtgtcgttgctgacgttgtagttcttgtcgcgcaggcctttgtgcaactggccattgatcagtggtgtgccgaagtagttctgcgggcgctggtcgccgtagtcgctggcgaaggtgaagctcaggttgtctgccgcctgccagcgcagggcaccgctgacgaagtcgctgctggagtcgccacggtcgataaaaccgttgctgcgcaggcgattgaggttcaggcggtagctcagggtgtcggtcagcgagccgccgctgtctagggcttgttgctggcgatcgtaggaaccgtagccgaggcggatgtggttttcgatcgcgccgtcgaagggctttttcggcacggtgttgatcaccgcaccggtggcgccttcgccgtacagcaccgaggccgggccgcgcagtacgtcgacgcgctccaccgaccaggtgtccaccgggaaggtcgaggtgcccatgcccatgtacatgcggttgccgtcatacaactgcatcaccgagccctggccggtaaaaccccgggccgacaacgaggtgccgccgtcgcccggcgtgccggtgcggctgatgccggtggcgcgggaaatcgcgtcctgcacactggcgtcgccgcgttcgcgaatctgcgtaccggtctggctctcgacgctgccgggggtttgcagggccgtgagattcaggcgcgagccggcggtggtcggggtcttgaggtcgacgtgatcatcgtccacggcaggtgcggtgacagggctggcgggcagggtcagggcctgggcgctggtatgcagggcgagcaggcacaggccggacgcgaggtacttgttcatcgggtggaaaatcttcttggcggcagtgctcgccgctgggcgcggcgagctgaggtatgcagtaagtgttataagttaacacttcctacgtcgagggtgaaagcccgcgtaagactacataacgcctctatgtggggcatctcgcctatttcatgtcgaacctgaggcagcttcacgttgtgcgaacagccgcgacagcaccaggcgatccaacacccacaccacgatcaacgacgcacccaccagcgggaaaacgatcgccagcccgagcatgatcaccatcgcggttttccacttcggcaggtcatggcgcagcggcggaacacccagcccgcccaccggccgacgcttccaccagatcaccacgccgctgaccgcgctgagcaggatcatcaggcagatcagcagcacgatcagctggttgacccagccgaacatcttgccctcgtgcagcatcaccccggtctcggtggcgcgcgccaccaggttgtagtgctcccagcgcacatcggcgaggactttgccggtgtactggtccacatgcaaggtggcgtcgttgcgtgggtcgttggcgaacaccgcgatggtgaatacaccttcggcggtggtgggaaaggtgatgctgtagccgggctcgacatggcgcgcgttggccaggtcgaccacttgttgcaggcgcaacgcaggtgcagccggcgcagcgtgcagggcgccgtggttcatgtgctcggcgtggtcgccggacatcggcatcggcgtgttctccatggcccacggcacggtctgttgactggctgtattgaggctgcgcgcctgttggtcggactgcggcacgttgttccacatcgccgctggaaagcgattccacagctcggcgtattgcttgccccagaagccggtccaggtcatgccgctgagcagcatcaccagcaacagcgaggcgccccagaagccggtgaccgcatgcaggtcacgccagagcacccggccacgggcagtgaagcgcggccacaatacgcccgccgatgatttgccacgcggccaccataggtacaggcccgacaccaccagcatcacgccccaaccggcggcgagctccaccaggcggtcgccgaccgtgccaatcatcagctcaccgtgcagggcgcgggcgatggcttgcaggttgtatttggcatcctgttcgccgaggaccgtgccgcggtaggggtcgacaaagaccgtcacttcgcgcgcgttgttatgcatcacgaactgcgcgctgctggtggcgtcggcggggggcaggtatttgctgatcgcggccttggggtaggccgcctgggcgcgttgcagttgctcgtcggcgctcagggcgtgcgcggcgctttgcaccttgagcaggtcgccgtacatcagcgggtcgagctggggtttgaacaggtagatgatgccggtcagggccagcagcaccatgaaaggggcgacgaagaggccggcgtagaagtgccagcgccaggccaggttgtagaaggaaactttttgagtgctcatcattgggctccgcaaggctttgaattttttgtgtctggttggccgtcatcgggggcttgcccccgatgctcctagaagctcatgtcgactttggtccagagcgttcgccctggctccttgatggcttgcgggtcggtggccgggtagccgaacccggcgttgccggccaggttcaggtgctcggcgtaggccttgccgaacaggttgtcgacgccggtgctgaccttgaagtgtttgttgatgcggtacgccgcgttcagcgagaacacgccaaaaccgccgctcttgtcgtagtccttgccgaccacgttgcccttgttggggtcgatgcggtgttgcgccgccaccacgcgccacaacgccccggcgctccagtcgtcttcgctgtaggtcaggcccaggcgtgcatccagcggtggcatttgcggcagcgccttgccgtcgctgctgttcttgccccaggcgtaggcgagggtggcgtcagccttccagttgcgcgtcagcttgtacgccgcgcccaattcgccgcccatgatgcgcgcgtcgacgttgcgggcctgggaggtggtacccatcatcccgggcctgtagtcgaacaggatgaagtcctgtacccggccgatgtaacccgaggcccaggcttccagatcgtcggctttgtactgcgcgccgaagtcgagctgggtggttttctccggcttcacaccgtcgaaggcattcaccgaaccgaccgcgccggtgttgggcgaaaacagctcccagtaatccgggaagcgttccgaatggcccaggcccgcatagacggtggtggggctgtcggccaggtcgtgttcataccgcacgaagcccgatggcagggtgtcggcgcgggtgtcgtcggcggtcgggttcgggcgggacatcatccccgagccgctggtttggcggaaatccttggccgaggcgcggtccaggcgtgcgccggtgatcaggcggtcgcggtcggcggcgtaccaggtcagttcgccgaacacgccgtagttatggaagttggcgtccttgacccggggcaagtccttgtaggtgtcgatgcccatgctgctgcgctggcggtgttcgttggtctgcgcgtcgaggccgctgatcagttgcacatcggcccagcgccaggtggccttgatccgtgcgccgagggtgcgccggtcgacgttggaggccatcggcccagccatcatcccggtgccggacggtgtgcgcaggctgtagttgtccatcacatggtcggcgtagttgtagtagacctgggcctcgaccttgtccagcacctcgccgatgttggacttttcaaagcgcagcccgaggctttcacgcaggaactgcgaaccgtccataccgcgcccggcgtaacgcgcttcgccatcgccacggccggcggtgagttccagcagggtgtcggcgtcgggggtgaagccgaccgccacatcaccgttccatttgtcatagcgcgaggcgacggtgtcgttgttgccgtccttgtagtcatcggcgtgggcctgattgccgatcacccgcacatagcccagcggcccgccggcggcggcatcgatgaccttgtcgaagcgcccgttggaaccggccagcacactggcgttgaggcgtgtgcccagctcgccgaactgctccggctcgcgctcgaacaggatggtgccggccgacgcgcccgggccccagagcacggtttgcgggcctttgatcacggtgagcttgtcgtaggtctccggcgagatgtacgaggtgggcgcgtccatgcggccggggcaggcgccgagcatcatgctgccgttggtgaggatgttcagacgcgagccaaacatgccacgcagcaccgggtcgccattggtgccgccgttgcgcaccagggcgaagccggggatggtcttgaggtagtcgccgccatcgctggcgggcaccggctggcgtgggtctttggggttggtgataacggtcagcgctgagctgggggcgatcgccgtgatcacggtgggcgtcagctcatgttcggcgtgctcgtcggcctgagcgtgaggtgccagtagcgcaccgcacagggcggcgagcacaggggtatatcccaaacgggtgtcagcagaaaacctggacatgacaaattccatcaatcagtcgtaaacaacacggccagcagcctgcggctgtctgtctaaagtcggccgggggtgaagtaacggtgttaagtgcttacgaagcgatgggcggcgcgcggctgcgggcgccggggaagatgctctgccgggcatggcccaggcgtgtggcgggggtgagggcgttggccggcggcgggctgctcagggtgaaggttgaaatgccgccgggcagggcggggcagctatagagcaggtcgcaatagccgcacttggaccagagggcgtggtgttcgtcaggtgccttgggttgatgggaggcgccgtggtccatcggcatgtccatcgacataccggcgtgatgatccatcggcatcgcttgggaaatcagcggaccgataaagatcatcagcatggcgaacaggctgatccaactgccgcttctcaggcgggcgtgtggagacaacctggcgcgaggggcgcccatcgcgtgtcagcctattgggcgtgcttatgctcgtgtgtcgccatcggtggcaccttctgcaccgacacttccacctcgaccttgccggccttttcgaaggtgagcgtcagcgggaattgcttgccgtcggccaacaggctgcggtccttgaggcccagcagcatcacgtgatacgccatcggcgcgaaggtcagctcgcccttggccggtacggcgacgctgggcacctgctgcatcttcatcaggtcgccctgcatcacatgttcatgcagctcggccttgtctgccactggcgtgtcgacgctgagcaggcggtccggggtctcaccggtgttgtgaatcacaaaataggcggcgacggtcggcgcattcggtggcaactcctgggaccagggatcgctgaccagcaggtcgccagccttatagtcgtcggcattggcagcactgaacaccggcagcaacaacgcagccagaagcagggatgatttgagcatggcagttctccagaacggttctaaacgcagttcaattgcgaagaagatcagaccgttggagaggcgcgggggttgaggctcggccattgctggcgcagggtggggctttgcagctggggcggcggcaagctctgtgaagtattgaattgggtgagatacaactgcggcacatgccccggcaacgccaccaacggcgccgagcccgagcagcaccagcaatgctgcatggtggaatgatcgtcctgctgctgcgccggaatctccagcttgcccagggcgatggtcttgaggctcgcgccattggaggaacagaaactgccccacagcaattgctggaccgggtcgctggactgttgcatcgcgctggccatcggcatggcaaaggcgttgaacagcactgcaaggcaggcgatccaggcaattgcaaagcgttgacgggccatggcggacaatccgtagggttaaacgatcaggcgggtatttagcctgatcgtaggggataagtaaaaaggggcggtgtggtttggtgtcgcagtgacgggtttgaggatagacgggtaatcgagtggatgccgatcttcaaagctgcacagttcaaatgtgggagggggcttgcccccgatggcggtgggtcagccgctgatttgttgactgagctgacgctatcgggggcaagccccctcccacatttggccggtgttcgacaatgaataggggcaagcagaaatatccgacaggcctttaaggttgtccctaggacactcaaactctagtctccgtacaccgctgcaaacgcagcggtcgggcgtcgcggcccggacttctccagacgccgaagcgtcattgcctcctttcagttggcgtttttttatcgtctactgtgcggcgctatggcggctgtgcgcgggataccttcgggtatgccggtgttctggagaatcggtccgcgaacctgcgtacagctgccacccccatcgcgtcgcggcgatcagtggcagctcctctattacttctccggagcttcacaatgatcaaacccaccccaaatcccccccaccggctattcaccgtagccgacggcttcagcaccgaagacctgttggtcaatctcagcgaaacccttgcctcggcgaatgcgctgagttgcgatcttgcgtttgacctggaaggctcgaaacgagatgaattgctcggcgttgcgcagttgattgagctggcgctgctgctggctgatcgtgtgcatgatggtgtagggcaaacgaaaaacgctgcgtgatgatgcagttctaaaggtgggagggggcttgcccccgattacggtgtgtcagtctatacatctgtgagtgatctaccgctatcgggggcaagccccctcccacatagaatcgatggtgtttagagagtggtgattgcctgtagaaccgcaggcacagtagtgaattctcgatccactgctgccaacaccggccgcttcaacaccaacaccggcactccaagctcccttgccacttccagcttcggctccgtcgcggtgctgccgctgttcttgctgatcagcacatcaatgccacgccgtgcgaacaacgcacgctcatcttcgatcaagaacggcccacgcgcgccgatcacttcacagcgctcgttccccggatacacatccaacgtgcgcagtgtccagaactgctctggcgggatctcatcaaggtgctgcaacggctctcgccccaacgtgaacaacggacgcttgaagggtttgagcgcttcaatcagcgaagcccaatcactgacctcgcgccaatcatcccccgcctgcggctgccacgccgggcggcgcaaggcccaacatggcacgccgctcaactgcgcggcctcggcagcattgcggctgatttgtgctgcatacggatgggtcgcgtcgagaatcagactaatcccctcattccgtacaaaccgcgccaacccctcagccccaccataaccgccgacccgcacctggcaggtcaggtcggtgggcacgcgcccaaccccggccaggctgtagatatgttccgggcccaatgtacgagcaatggccagcgcttcggtcacgccgcccaacagcaggatgcgtttcatagcggcttgaccacttccagcaaggtaatcggcaacgcctggcgccatgtatcaaactcccccaacggctgcgcctgagcgacatggatgcgcgtcagttcgccgccatactgcgcgcgccagttcatcaaggtcatttcgctttgcagggtcacggcgttggcgaccaaccgcccgccagggcgcaggtgttgccagcaggtgtcgagcacgccttcgcgggtcacgccgccgccgatgaagatggcgtctggtgcttccaggccaagcaatgcagcgggggccttgccgcgaatcagttgcaggccgggcacgccaagggcgtcgcggttgtgttcgatcaggccttggcggccttcatcggcttcaatcgccagcgcgcgacaactgggatgcgtgcgcatccattcaatcccaatggagccgctgcccgcacccacatcccacagcagttcgccgggcatcggcgcaagacgggcaagggtcatggcgcgcacatcgcgtttggtcagttggccgtcgtgcttaaaggctgagtccggcaaacctgcacgacgcgacaggcgagcagtatgggcgtcggccaggcagtcgatggcgacgaggttcaaatcggcgaccgaggtgtgttcccacgagtgcgccaacccgtcgatgcgctgctcatccgcgccgcccaagtgttcaaacacagacaaacggctagcaccgaacccggattcgcttagcagcgaagcaatcaacgccgggctgcgcccgtcattactcaacaccaacaaccgcaccccactggccaggtgcgcattcagcgccgccaacggccgcgccaccaccgacaacgtcaccacgtcctgcaacggccagcccaaccgcgctgccgccaacgataccgacgaaggcgccggcaagatcagcagctcatccgccgccacctgccgcgccaaactcgcccccacgccatagaacattggatcgccactcgccagcacacacactggctccccgcgccgcgccagcaccggctccagcgaaaacgggctcggccacacctggcgttcgccacggatacacaccggcagcaggtccaactggcgctgagcacctataatccgcgtggcgcgcaacagggcatgccgggcgttcctgcccagccccttgaagccgtcttctccgatgcctacaaccgtcagccagggcgacatatgaattccttgaacgacatccgacgggcaggcttttcatgccgccggacaaagcaggcataataccgcgcctttacccaccaaccggtagccccgtgaacccaacgcccgctgtgaataccttgcgcccctcggcctgtccggggttgctgcgtattgtccaggcgttggatggcggtatttgccggatcaaattggccggtggttcgatcaccagcaagcaagcccaagtggtggcagatgcggcccaggcctatgcgggcggggtgatcgaggcgaccaaccgcgccaacctgcagattcgcgggattggtgcccaagagcaggcattgatagccctgctactggacgcaggcctgggtcccaacaatgccgccggcgacgatgtccgcaacctgatgctcagccccagcgccgggatcgacccgcagatgctgttcgacacccgcccgctggccgatgagatcctcgccaccctgcaaaaccacccacgtttccatgaactgtcagccaagttcgccatacagctggatggcggtgaagccctggcgatgcttgagcatcaccacgacctgtggctgtcggccttcatccgcaacggccagacgctcctcgcgttcggcctggccggttgcccggggctggatgcgccactggccgccgtgccgctggagcaggggcatgcgctggtggtggccgtgctggaggcgtttctgaacattgccactccagaacaaacccgcatgcgccacctgcctgtggataacgtgctgagtcatttaaaccagccgctattgcctgttgatggcttcaaacgccagcccagcggggctttgctgcaccttggcacttatccacaggatcaaaagaatcagttttatgttgccgccatcgcacccttgggccgcctggatgcgacgatgctcaaaggcgccgcgcaactggccagcgagtacggtgatggcaccctgcgcttcaccccttggcaaggcgtgttgctgcccaacatcgaaaaaccgtacgccgtgaccgagcgcctggcgcaactgggcttcctttgctccatcgatcaacccctggcgcgcatgaccgcctgcaccggcgccagcgggtgcggcaaggccctggccgacaccaaggccgatgccgtgcaactggctgccttgcagcccggccatgacgtgcacctgtccggctgcccccgttcctgcgcggctgcgcacgttgcgccggtcaccttgctggcggtgagccccggccactacgacctctatttccgcgacgcagcccaacccggtttcggccggctgcacgcgcgcaccctttccattgaagcggcgggcgccctgttgcgcgctcgtccacggagcaacaccgatgattgattacatccgcgacggtcaggagatctatcgcaactccttcgccattattcgcgcggaagccaagttggagcgcattccggccgacctggaaaaactcgcggtgcgcgtgattcatgcgtgcggcatggtcgaggccatcgacggcctgcagttttccgaaggcgcgggcaaggccgggcgcgatgcgttggccgctggcgcgccgatcctgtgtgatgcgcggatggtctccgagggcgtgacccgcgcgcgcctgccggccaataacgcagtgatctgcaccctgcgcgacgacagcgtgccggcgctggcgcgggagctgggcaacacccgttccgccgccgcgctggagctgtggcgtccgcacctggaaggcagtgtggtggtgatcggcaatgcgccgaccgcgttgttctacctgctggaaatgctcgatgccggtgcgcctaaacctgccttgatcctgggtttcccggtcgggtttgtcggtgctgccgaatccaaggcgatgctggcggcggacagccgtggcgtgccgttcgtgatcatgcagggtcgcctgggcggcagtgcgatggccgccgccgcggtgaatgccctggccacggaggtcgaataatgccggcacgcggacgtttgatcggcctgggcgtaggccccggcgacccggaattgatcaccctcaaggcgctgcgcctgctgcgcgaatcgccggtggtggcgtatttcgtggccaagggcaagaagggcaatgccttcggcatcatcgaagatcacttggtgccccaacagaccctgatgccgctggtgtacccggtaaccaccgaggtgctgccggcgccgatgtcctatgagcaggtgatcagcgatttctatgacgccgccagcgtcgatgtcgccgcgcacctggatgccggccgtgatgtggcggtgatctgtgaaggcgacccgttcttctacggctcctacatgtacctgcatgaccgcctcgccgaacgctacgaagcgcaagtcatccccggcgtgtgctcgatgctcggcggcgcctcggtgctgggtgcgccgttggtgtatcgcaaccagagcctgtcggtgctctcgggcgtgttgccccatgaggatctgaagcggcgcctggcagacgccgacgcggcggtgatcatgaagctgggccgcaacttcccgaaagtgcgccaggtgcttgaagaactcggcctggccgagcgtgcgctgtacgtggagcgggcgaccatggccaaccagaagattgtgccgttggatcaggtcgacccggcgtcttcgccgtacttctcactgatcatcgtgccgggcgaaaggtggcaaggttgatgaacccggcgattgtcattctgggccagggcagcctggccaccgcgcgccggatccaacagctctaccccgaggcgcggatccacggtctggccgggcgcgttggaggtgctgaccagacttacagtgagttcggcacgaccttgcgccagttgtaccagcaaggcacgccgctgattgcgctgtgcgccgccggtatcgtgatccgcaccctggcgccgctgctgctggaaaaaggtgaagagccggccgtgctggccgtggcggaagacggcagcgccgtagtgccgctgctcggtggccttggcggtgtgaacgtcatggcgcgcgagattgctgccgcgttgaacgtggccgctgcgatcaccaccagtggcgaactgcggtttggcacctgcctgctcaacccgccgcagggctatgagctggccgacctcgagttgggcaagcggttcgtttccgacctgttggccggtgaaagtgtgcgcatcgaaggtgtagcgccgtggctggatcaggccaacttgccgcaggatcaacaggcgcgcctggcgattcatgtcggcagtgccgagcgccaacccaccgccaatgaattgctgatctacccgaagaacgtcagcgtgacctgcaaacccggcgcgcaattggccgagcgtgtgcgcacggcattgcatgaagcgggtatcgccgtgcaatccctggcgtgcctgctggccagcgaaacgcagatggccgaagcgtcgttgcgtgacgcggcgttggaactgggggtgccgctgcgttttaccggcgtttcccaggacgccgatatcgtggtcagcgtggctgaacagccgctggacttgtcgcagatcggtcgtgttcgtggccgccttgccgtgatcggcctgggccccggtgccgccgagttgatggtgccagcggtgaaggctgaactggcgcgttgcaccgatgtgctgggttacgagacctatgtgcgcatggccggcccgttccgcgaggatcaagtgcaacactgcaccgataaccgcgaagaaatgcagcgtgcccgtcacgccttcgagctggcggcccaaggccgttcggtggtggtggtgtcgtccggcgacccgggtgtgtttgccatggctgccgccgtgattgaggcgttgcacgaatccagcgacccgacctggcatcaggtcgacctggagatcctgccgggcgtctcggcttcgcttgccactgccgcccaggccggcgcaccgttgggccatgacttctgcgtgatgtcgctgtcggataacctcaagccctggtcgatcatcgaaaagcgcctggacctggcgtcccaggccgacctggcgctggcgttctacaacccgatctcgcgttcgcggccttggcaactggggcgcgccctggaaatcgtcgccctgcatcgcacaccgcaaacgccggtggtgctgggccgtgatatcggtcgcccggggcagagcctgcgtgtcactacgttggggcaactgacgccggagcaggtggacatgcgcaccatggtgctgatcggctcgtccaccacctgcacattcccccgtgccggtgggggtgaatgggtctacacaccgcgctggtacggtgaaaaacccgcctcctgaaaacggcctgtcgtctgcctgaaagcgccgaattgcccagggattttcctggcgttgttcggcgctttttcttttttttgcgacgaaatatggaaactcacccgtgatgccgcgttattgctgggcgttgtggttcaacgggttgcgccaagggatttttatcgtctggaaagcccatcggccagtgaactagggtggacacaagccccacgttggggtgcttgtggagaatcaaaatggagcgacatcacagacggatcaacagtacaaaaaggcgcaagttgattgccgcctacaaattaccgggcgcgtcaggcaagcacgcgtctgtaccgctggacaccgaagatgacttcaatgcggcggtggtcaacaacagtgtgatttcgtttgccgaaggcctttcgggtctgaaccgagagtacgtgcgtaaaagttatctgctggccagcagctacgtcagcgatgtgttgaatgtgcaccgcggtaccgaggactggtacgacgaattcatcaaggtgatggtcagcctggggtggctcccggtgcgtagcagcttcgaacgggtctcacgttcgggcaaggggctgaccgtgcagttggcggcgctgaaccttattgccacgctgttggcttccacgtccttgtccgcgccgctgcttagcgtgatgccgaaactggcggcggatgcactggaggcgttgaagcaggcgccggcgtcttttgaattgttcaagcgcaacagctcggtgcaccagggcggtgatttcggcctggcatcctgtgccgaaaccgatggcgaattgacgatggtgctggtgacctacagcactcacggcgtgagcaaacaggtagggctgcccttcctggagtgggacagttcctcgtgcgaggccttcagcgggcagacgtgcctggtgctgaatacctcggtggtcaacgaaaagacgatccaactgatgcgcgagagcgcgggagacaaagtacaactggcgattgccaaataccggatctaaggcaccaggtagccgcgtaccccggtgaagatgatctgcgcggccagggcgcagacgaacaggcccatcaaccggctgacaatctgcaagccctggtcaccgaggatgcgttcgatacggttggacaggtacagcaccacgcccaccgtgaggctggccagggcgatgctgaggatggcggtgagcttgtcatcccagtgcggttggctcacgcccatcaccagcagcgcaccgatggtgccggggccgacggtgagtgggatggtcagcggcacgatggtcacatcctgctgcacgttgtcggtctgcaccgccgacttgccctgggccatgcccagggcggaaatgaacagcacactgccggcgccgatgcggaaggcgtcgacggtgatgccgaacacactgaaaatcacccggccgaacaggtacagcaatacgctcgataccagggtcgccaacgccaccttccacgccaggcgccgccgctctttgctggaatagccacgggtcaggctgataaagcaggacagcacgaagaacgggctgtagagcaccagcattttcaggtagacgctgaataacacgtggagcatgggggcggctcgcaggaggaaagtgtggagagtctatcaggcgccagagatcaaatgtgggagggggcttttgtggtgagcgggcttgccacgcgctgggctgcgaagcagccccaataagaacgccgagttatgtcaggcactctgcggcgtttggttttagggccgcttcgcgccccagcgcggggcaagcccgctcaccacaaaaaccagttcctacaggagggcagcgtttcaagttaagacggggcgtgctcgggcctttgctgacgctgcgccacccaaaactccaccagctcgcgcaactgcgacaactccaccggcttggccatatgcccatccatcccggcctggcgcgcacgctccttgtgttccgacagaatgtgcgccgtcaacgccaccaccggcgtgcggatgcgctggtggctgacttcccaggcacgcagctgctgggtcgccgagaaaccatcgaggatcggcatttcgcagtccatcaacaccaggtcataacgctgggccttcattgcttccagcgcttcctcgccattgctggcagtgtccgggctgaggttgagcttgccgagcatgccgcgaatcaccttggtggagatgctgttgtcctcggctaccaggatgcggaaatccgtcggcacggtgatggcggccggagcgctgaggaccgggcgtggcagcacgttgcctttgctgcgttgggtcagttcatccgccagggtggtcttgagcgtgtagccggccaccggtttggcgaggatgcgcttgatcccgcaattgcgcgcgatgatcttgctcggcgcgttgctgatgccggtgagcatgatcagcaggatgtcgtggttcaggctcgggtcttccttgatctttgccgccagttgcatgccggtcatgccgggcatgttctggtccagcagcaccacatcgaagtaatcgcgcaggtgcgccttggtgcgcagcaacgccagggcttccttgcccgagggcacggcgctgacgttgaggccccaggccgaacattgttgcaccagtactttacggcaggtgtcgttgtcgtccaccaccagcacgcgcgcgcctttgagcgggccgtcgaggtcggaggtcgggtgttccaggcgttccgggtccagcggcagggtcagccacagggtgctgccctggtggctgccgctcttgatgccgaactcgccattcatcaacaggatcaactggcgggcgatgaccaggcccaggtggccgttcaaacgggtggccgagaagaaattcttgctgtgcagttcgctgtgcagcagggcatcgcgctcggcgggttccatcggcaggccgctgtcttgcacggcaatgcgcaggcgtggcttggtgctgcggtcgtccagggccaccacgatcagcacttcgccttcgtcggtcttttgcagggcgttttccagcagactcaacatggcctggcgcaggcgcgtcgggtcgccgctgatcacgcggggcacctggggctggataaagctgatcagttcgacgttctgctgctcggccttggcgcggaagatactcaggcagtcttcgatcagcgcattgaggtcgaactgcacatcgtccagttcgatctggccggattcgagcttggagatatcgaggatttcattgatcagcgtgagcagttcgttgccggcgctgtggatggtttgcacgtagtcgcgctgcttcaccgacagtggcgtacccagcagcagttcggtcatgcccaacacaccgttcatgggggtgcggatttcgtggctgatcttggccaggaactcggccttggccgcgatttcggcattgctcgccgccaggtcgcggctgaggctgaaacgcgcctcgacaatcgcacgctggcgttcgcccaacgccaggctcatcagcaggccgctgaggcagataaacgccagcagcgtgacgatcaggccctggggcgagaccatcgtcaggcccagcaacgccggcaggatgatcagcgtaccgatgttgaacaccaccatcgccgccacgaacaggcgtgccgggcggtagcctttctgccagtgataggctgagacaaacagcatgctcaagccggcgagggccaccagggcgtaggtgatgatgttcagcggcagggtgttgacgaacaacagcaacaggccgcacagcacgatgaacaggatgtccgccatcaacagcttgttcagcgggtgcgggcccaggggcatgaagaaacggtaggcaaacatcaaaccgcagggtgcggtgagcagcagcgccaggtaggcgcctggtgtctggattgcatgccagttcggcagccatggccctaccaggttgagcagcagcgccaggctgagcatcagcagcacttcgcacgccgccagccacaggctgctgcgcgagcggtggtaggcgaagcgcgtcaggttgtgcaggatcagcatcagcaggcagccgaacagcaggccgtagatcagcgtctgggtctggtcggcggcggcgagtacggctggttccagggtgatgtaggggcgcagttcgtgttccgagaccaggcgcaggtaaacctcgaggggcttctggctctggggcagcggcagcatgaagtcactgctgggcaacggtcgttcagcctggggctggcgtgtgccggtgctctgttgttccaccagggtgtcgccgtccagcacgtagaggctcaggtgcgacaggtccggggcgaatacccgcagcacttgttcgtgcttgccgggttgcagcttgaaacgtacccacaacgcaccgtccggttccgcggcggtaatgcggtccagttcgatggggctgaattggttggtgtagcgcgaggaacggatgtcgctcagctgcaggtcggcctgttcatcaagcaatactgcccagccactgccttgcgcggcggcctgggccgggaacaagcagagcagtgtcagcagactgacagtgaaacctatggcgatcctgagccagcgcacggcgaaatcccttcgtaggttgatgcacggttaactatgcgcgggtaggcctgcatacggcaagggccagaggcccctgcctagccgaacggatagctgcttactggttctcgccacgctcccgcgcaatggcgcgatagccgatgtccttgcggtagaaacagcctttccagtcgatcttcgcggccagcttgtaagcctgttgctgcgcggcgtcgacgctggcgcccatggcggtggcgcatagcacacggccaccggccgttacgacctggccatccttgagcgcggtgcccgcatggaacaccttgccttccagcgtagcagccgcgtccaggccttcaatcacatcgcccttggcgtagtcggcagggtaaccaccggccgccagcacaatgccgacgctcggacgtgggtcccactgcgcttcaaccttgtccagggcctgggccaatgcggcttccaccaacagcaccaggctcgattgcagacgcagcatcaccggttgggtttccgggtcgccgaagcggcagttgaactcgatgactttggggttaccggctttgtcgatcatcaggccggcatacaggaaaccggtgtacacattgccttcgtcggccatgccgcgcacggtcggccagatcaccaggtccatgacgcgctggtgcacgtcggccgtgaccaccggggcaggggagtaggcgcccatgccaccggtgttcgggccggtgtcgccgtcgccgacgcgcttgtggtcctggctggtggccatcggcaagacgttcttgccgtcgaccatcacgatgaagctggcttcttcgccgtcgaggaactcctcgatgaccacgcgggagccggcatcaccgaacgcgttgccggcgagcatatcgcgcacggcgtcttcggcttcctgcagggtcatcgccacgatcacgcctttaccagcagccaggccatcggccttgatcacgattggcgcacctttttcacgcaggtaagccagggctggctcgatctcggtgaagttctggtagtcggcagtcgggatcttgtggcgggccaggaaatccttggtgaaggccttggagccttccaactgggccgcaccggcggtagggccgaagcaatccaggccacggctgcggaacaggtccacgacacccgccaccagcggcacttccgggccgacgatagtcagggacacattcttttcagcgaagtcggccagttgctcaagggccagcacgtcgatagcaacgttttcgcacttggcttcaatggcggtgccggcgttgccgggggcaacgaagactttctggacgcgtgggtcctgggcaactttccaggccagggcgtgttcacggccaccgctgccaatgatcaaaacattcatttcaaaaacctcggatgacgcaaattcttgggaacactgtgggcgcttttctgtgggagctggcttgcctgcgatgcgggcgcctcggtgtaacaagtgcaccgaggtgatgctatcgcaggcaagccagctcctacagaagccagtgcccaccaggcaatgttggatcagtggcggaagtggcgcatgccggtgaagaccatggcaatgccggcctcgtcagcggcggcgatcacttcggcatcgcgcatcgaaccacccggttggattacggcggtcacaccggctttcgcggcattgtccaggccgtcacggaacgggaagaacgcatcggaagccattaccgaacccaccacctgcaaaccggcgtgctcagccttgatcgcggcgatacgcgccgagttcacccggctcatctggccagcgccgacaccgatggtctggcggttcttggcgtagacgatggcgttggatttaacgtacttggccaccttccaggcgaagatcaggtcgttgatctcttgctcggtcggcgcgcgcttggtcaccactttcaggtcggcgctgccgatcatgccgatgtcacggctctgtaccagcaagccaccgttgacgcgcttgtagtcccaggccgccgcgcggtcagccgaccactcgccgcaggccagcaggcgcacgttggctttggcggcgacgatggcgcgggcttcttcgctgacgcttggggcgatgatcacttcaacgaactgacgctcgacgatcgctttagcggtctcggcatccagttcgcggttgaaggcaatgatgccgccgaaggccgattcggtatcggtagcgtaggccagttcgtacgcctggcggataccgccttcagcgtccgggctcacggccacgccgcacgggttggcgtgcttgacgatcacacaggctggcttgacgaagctcttcacacattccagcgcggcgtcggtgtcggctacgttgttgtaggacagctctttgccttgcagttgggtcgcggtggcgatgcccacttcggcaggcttggcctccacgtagaacgccgcgctctgatgcgggttctcgccgtagcgcatctcctgggccttgatgaactggctgttgaaggtgcgtgggaactggctgcgaccttctgtgcttagggtttcagcggtctggttcacggtgcccatgtagttggcgatcatgccgtcgtaggcggcggtgtgttcgaacgccttgagcatcaggtcgaaacgctgggcgtaggtcaggccaccggccttcaggctttccaatacgttggcgtaatcactggcgttgaccacgatggccacgtctttgtggttcttggccgccgaacgcaccatggttgggccgccgatatcgatgttttcgatggcggtcggcaggtcgcagcctggcttgttgatggtggcttcgaacgggtagaggttaacggccaccagatcgatcggcttgataccgtgctcggccatgatcgcgtcatcggtgccacgacggccgaggatgccaccatggatcttcgggtgcagggtcttgacccgaccgtccatcatttctgcgaagccggtgtagtccgccacttccactgcggccacgccgttgtcctgcagcagtttgaaggtcccgcccgtggagaggatttccacgcccagagcttccagctcccgggcaaattcgaggatcccggtcttgtcggagacactgatcaaggcgcggcggatcggcaggcgggtagtctggtcggtcatttcaatttccatcaaaagcaaaggagtcagcaaaaaaggcgaccggttttacgcgggcgcctttctggtttgattgaatgcttacagcaaatcgtattgcttgagctttttgcgcaaggtgccacggttgaggcccagcagctcactggctttggtctggttgcccttgacgtagttcatcacgctttcgagcaagggcgcctcgacttcggagagcaccaggttgtacacgtccgtgacggaagcgccctcaaggtgggcgaaataattgtgcagcgccttctcgacactcccgcgaagggtctggccttcttcgctcggcgtgttgaggtgctgtttcaaattgacgttgtcgctcacgggtgttgttccactcactaaagtctcggtcatcatcgtcatgcggccaccccctctccgtcccctgtccccaggctcttgtaacgctcgctgaagaactcacgaacgttggcgcattgtgcttccgtatcatccaaacgattgaagtgggcgcgaaactccctggcgcccggcagggttgcgagataccagccgacatgcttgcgagcaatgcgtactcccatcacatctccatagaaggcgtgcagggcggccagatgctctagcagaatacgttccacctcgattagctccggtgccggcaacacttcaccggtacgcagaaaatgctcgatctcacgaaaaatccacggacgcccctgggcggcccggccaatcaacaagccatcggcaccggtggcgtgcagcacgcgccgggccttctcggcggagtcgatgtcgccattggcgaataccggcatcgataccgcctgcttgatcgcagcgatggtgtcgtactcggcttcaccggtgtaaaggtcggcgcgggtgcggccatgcaccgccagcgctgtaatgcctgcctgttcagcgatcttcgccactgtcaggccgttcttgttgtcccggtcccaaccggtacgaatcttcagggtgaccggcacatccactgcggcgacaacggcctgcaggatctcggctaccaactgctcatctttcaacagggcggaaccggcggccttgttgcagaccttcttggccgggcagcccatgttgatgtcgatgatctgcgcccccaactccacgttggcccgggccgcatccgccagcatctgtgcatcgccaccggcgatctgtaccgagcgcggctcgggatcaccttcgtggatcatgcgcatccgcgatttgcgggtgttccacaagctcatgtcgctggtgaccatttccgagactactagacccgcgcccaaacgcttgcacagctgacgaaagggctggtcggtgacgcccgccatcggggcgaggatcaagccgttctgcaatgtgtatgggccgatgcgtaccgccgacataggacttccctgttgtggggccggatcattagagttcgaaaaagggttggcatgatacccgctctcgatgactggataaaggctgaattggataaaatctgaacagttatttctttatcgccagcggtttggttgcgcaggggaaagtcaataacctgccgtcaaacctcaatgcatgaaccgattcactcgggcgagtggaagctcaggctgtaattcacggctttgttgcccggatcgaggatatccagggagatatggatcggggtttgtgatggcatttcgctaacgccggccaactcaccgctgaggtattcggcgggtttgaagcgacggctggcaatcaggttgccgttcaggtcggcaaaacgcagctccagcagcgggaagggctgggagaaggttgcacggttatagatgatcgcatccaccaccagcgccccggcgaaatcggggtggctgcgcaccaccaggttactgctcttgatatgggcgatatcgacccgcgacggcactgtgcaacccagggtggggcacagttgctggaaccacgggcgatacgcgtcctggcgggccaggtcgtcgaattggtaggcgatgtattggcctgcgaggccggcggcggcgatcaggaccagcagcagccagaccaggcgacggcccaggcccgtcgggcgtttgtgtgcgtagaggtgcagcggatcgtcttccaggtcctggagcaaatcgtcatgggcgctggtttcagcgcgtgggcgcttgcggcggggtggcaggcgatcttcggggtcggccgctttggtcagcggcgtgaacggtgggtcgatgtcgtcatcgtctggtgttgagcgcaggggtggctcatcgtcgagatcgtcggtgtggagcgacatggacggttcggtgcgctgcctggtcgcaggttctggctcgttttcgctgtcgtggaggcgctcttcaggcggctcgctgaacaggcttgccgcccatttctcttcttcggccttgacgctgtcgcggctggcgctgagaggctcgtccttttgtcgacgatcggcgcccgcatgccggcgttctgcgcccgggggcagggtgtgctgaatctcgcggcgttccagcttggccagttcttcgtccaggtccaggttgtccaggtccagctcttcggcggtccactgtttctggctgatggcgcgcggcgcctcggcagtggtctcgggctgcggcgccggcgcctggccgcgttgctccaacagctggcgggccgcattgaacacttgcaggcacgagccgcagcgcaccacgccacgggccacgctcaattgagcgtggctgacgcgaaagcgtgcttggcaatgcgggcactgggtgacgaaactgtcggtcatgcggccatccgattcaggcaagcgctcattctagcgccgacgaccgctgatgcgtacccagccatcgcggttggcgatcggatccagctcgaaatccttggcgtaggcggcggcgacgtcttcgccctgctcggccaggatgcccgacagcgccaggcggccgcccggcctgaccaggctcgacagttgcggcgccagcgccaccagcggcccggcgaggatgttggccaccagcacgtcggcctgtacctggggcagttgctccggcaggtagagtgggaatttgccttcaggaatgttgttgcgcccagcgttgtcgcgggaggcttccagggcttgcacgtcgatgtcggtgcccacggcttccttggcgccgagcagcagggcggcaatcgccaggatccccgagccgcaaccgaagtccagcacgtggctgtcggtcaggtcctggccgtccagccattccaggcacagcgcggtggtcgggtgggtgccggtgccgaatgccaggcccgggtccagcagcaggttgactgcgtcgggctcgggcgcggcatgccagctcggtacgatccacaggcgctggccgaaacgcatcggctggaagttgtccatccagctgcgttcccagtcctggtcttcgatgacttcgctgtggtgctctggcagcgggccgccggtgagcagttccatatgggccagcacggcgttggcgtcggtgccgtcttcgaacagggccagcaggtgggtgtgggaccacagcggcgtggtgttgagttcgggctcgaagatcggttggtcttcggcgtccatgaatgttacggagacagcgcctacttcgaggaaagcgtcttcataggtttcggcttgttctgggctgatggcgagacggacttgcagccaaggcatggcgggcacctttgaaaaaatgagtgtgcagcggggtggggctgcgaaagggcgcaagtttacgcgagcgcacagaagaagacgacatacaccgatcaaatgtgggagggggcttgccctcgatggcgatggatcagacacagctgcatcaactgacactccctcatcgggggcaagccccctcccacattggaccctgtacatccagaaattccagggcccagacacaacaaagccgcccggaggcggctgtgttgtttggagcacttactggttggccagcttgtgttccaggtagtgaatgttcacaccaccttcgcagaagccttcatcacgtaccagttcccgatgcagcgggacattggtcttgatgccatccaccacgatttcatccagggcgttgcgcatgcgggccatggcctcatcgcgggtggcgccccaggtgatcagcttgccgatcaacgagtcgtagttggacggaaccttgtagccgctgtacaggtgcgaatcgacgcgaacgccgttgccacctggagcatggaaatgcttgaccaggcctgggctcgggataaaggttttcgggtcttcggcgttgatccggcactccagggagtggccgtggatcttcacgtcgtcctgggtgaaggacagcacgttgcccgcggcgatgctcagcatctccttgacgatatcaataccggtgaccatctccgagaccgggtgctctacctgcacgcgagtgttcatctcgatgaagtagaaacgaccgttttcgtacaggaactcgaaagtacccgcgccacggtagttgatatcgatgcacgccttgacgcagcgcgccaatacttcctggcgggctttttcgtccaggcccggtgccggggcttcttccagtaccttctggtggcgacgttgcagcgagcaatcgcggtcacccaggtgaatggcgtggccctgtccgtcggacagtacctggacttccacgtgacgtgggttggtcaggtacttttccaggtagaccatcgggttgttgaaccaggcgcctgcttcggagcgggtctgcttggcggcttcgatcaggtcttcttccttgtgcaccacgcgcatgccgcgaccaccaccgccaccggcggccttgatgatcaccgggtagccgacttcgcgaccaatgcgcagagcggtttcctcgtcttcaggcagcgggccgtcggaacctggaacggttggcacgccggcagcgatcatggcttccttggcagagaccttgtcgcccatcaggcgaatggtctcggctttcgggccaatgaaggtaaaaccggatttttccacctggtcgacaaagtcggcgttttccgcgaggaaaccgtagcctgggtggatggcggttgcgcctgtcacttctgctgcagcgatgatgcttgagactttcaggtacgagcttgtagccactggcgggccgatgcagatgctttcgtccgccagtttcacgtgcatcaattcagtatcggccgtcgagtaaacagcgacggtcttgatgccttgttccttacaggcgcgcaggattcgcagggcgatctcaccgcggttggcgatcaggactttttccagtttcttcgcaggtttcaacatcgaaggcactccgcggttcaaacgatggtgaacagcggctggtcgtactcaaccggctgaccgttttctaccaggatggattcgatgacgccggctttttcagcggtgatgtggttcatcatcttcatcgcttcaacgatgcagatggtgtcgcccactttcacggtagcgccgacttcaacgaaggctggcgaagtcggtgccggggtgcggtagaacgtaccgaccattggcgacttgaccacgaagccgttcagcgccggagcggctggggcggcaggtgcagcggcagcagcaggcgcggcggccggagcagcagcggccggagccggcgcttgcatctgtggcgcgtagaactgttgggccggggtcttgctgtggcggctgatccgtacggactcttcgccttccttgatttccagctcgtcgataccggattcttccagcagttcgatcagtttcttaactttacggatatccatgaatcatcaactcccaagggtcggtcaggggcgcttggccggttgttcaagttgttccagggcggcctccagggccagtcggtacccgctggcgccaaggccgcagatcacacctaccgctacatcggagaagtaggagtgatggcggaaagcttcgcgtttgtgcacgttcgacaaatgcacttcgatgaatgggatgctcaccgccagcagcgcgtcacgtaatgcaacacttgtatgcgtaaaagcggcgggattgatcaggataaagtccacgccttcgccgcgcgcggcatggatgcgatcaatcaattcgtactcggcattgctttgcaggtagagcagatggtggccggcttcacgcgccctgcgttcgagatcaaggttgatctgctccagggtgactgccccgtagacgcccggttcacgggtgccgagcaggttcaggttgggtccgtgaagaaccagtaaggtcgccatcggctgttccttgttattgatgtgggtacggcagaacccggcgactatgccgcaaagcctttgtgactgtccagttctatgcagtaggcggcacgattagcgaggatagcgcgaaaattgtgactgtggggctggattcggtcattggcaacaccgtctcgaatcctgtggagatcgtgtcagacgcggaaggcttgaacggcagtgttgagctgcccacccagcaccaacaactgctcaccctgtcgtcggccctgtccgattcgcagcaaattatcctcacccaactgatgaatccgctcactgttgtcgcgaatctcactgacggcaccactctgctgcgcggtcacatcggcgatgcgcacggcggtctcggagatggtctggatcgcgccgacgatttcatccagcgcaccgtccgctgcctgggcttgctgggcggtggcttcggcgtgttcgacctgggcgcgcatgccttgcaccgattggtgggcggcgctttgcagcccggcgatcaaggtctggatttcggcggtggcgccagcggtgcgttgggccagcgagcgcacctcgtcggccaccacggcaaaaccgcgtccggcttcaccggcacgggcggcctcgatggcggcgttgagggccagcaggttggtctggtcggcaatcgagcggatcaccgtgagtaccccgccgatggtggcagattcctcagcgagtttttcgatcatctgcgcgttttgctgcacttcgcccaccagggcatgcagcccggtcaggctcaggccgatcacgcgctggccttgctccaccgcctggccggcgctgcgactggcaccggcagcctggctggcgtcgccggcgacttgctggatcgtcgcttccagttcgcccagcgaatcacggatctgcgcggtatccccggcctggcgttcggcgccgtcgtgcaggccgctgctcagttcggcgagggtgcggctgctgccggcgacttcctcggcgttgccgcgaatggtgccgaccaaatccaccaggtaggcgcgcaggcggttcagagacgcttcgatatcgtgcagttcgcggttggtcttgcccagggcaatcggccggctgaagtcaccttcggcccaagtcgacagggctggcgccaggttggtcagcactcgcgccagcttgcgttgcagggtgtcgatcaatagcgcgatcaacaggatcaggccaatcatcagcccttgcatcaggcgcacttcgccctggatcttggcgtgttgcgcacgcacgaccggctccaggccggcgatggcttgttgcacggtgttgattttctggtgggttttggcggccaggtcggtgcgttgctggatctggtcgcgggtgcgcttgagttcggcggggtagcgggtcagcaggctgttgagttcacgcttgaggtcgacgccggtgtcttgggcttcagttttttcgctgttctccaggcccatcagcgcagaaaaatcatcggcgctggactcggcgctggccttcacgccgagcaacggcagttgctccagcaggtcggcctggctgcgaatgttgccgacttcgcgttccacatcgtcggccagttccgcacgcccgctgctcaccagtttgtcgcgggccagcgacaacttgcccagatgctgggaggcggccagcaacggcggcagatagcgggcggcttcgggagaactcacgccgatggcgtactggctcagttgctccaggttggcgcccaattcacgttcggcttgcagcagcaaggcttgcgggtcgcctgccagcttgccggccgccagcaagtcggtcttgctgaacgcatccaggtccaccaggcttgggcgcaggttctgcgccaggtccgccggcagttcatccagatgctgtaccaggctttccaggctctggcccgcgctgctcaagcgcagggcgtcgccgctggccaggtagtcgtcgatattgcgcgcggcttcgttctggaaactctgcgacaggcccaggtagcgctccatcagcaaatagggccgctccagcgcccgttgcgaccaccacaacgtcgcccccagcgccaggcacacggccaccagaagaagggtattgagattggtcagcagcttcaggcgcatgcgtggtttcaaccgacagcaaaagataagtgcctgaagttattgcgtttccgttacaaagttatgacggaatcagtggattccggtgaaaagatggcactttgctttgatgtgcgtgcggcttgcacacgattgcgcccagcgtccttggcacggtacagcgcctcgtcggcctgggcggccatcatcaggctatcggagccgtcgcacagctccaccagtcctgcgctgaaggtgcaccacaaatcctggggttgcgccgggtagtggatctcggcaaagcgcccacggatttcatccagcactctgcaggccgattccagatcggtgtcgggcatcacgatggcgaattcctcaccaccatagcgcccgatgtagtcggtcttgcgcaggcgctgcttgagaaacagcgccagactcttgatcacgcggtcgcccatggggtggccgtggctgtcattgacccgcttgaagtggtcgatgtcgagcatggcaaagctcaatggcttgttctcgcggcgcgcgcggaagctgcagtcttcgagcaattgcaggatgtgggtgtggttgtacaggccggtcaggctgtcgcgtaccatccgcgccttgaggttgcgcgcccgcgccgcgcggttgcgcacggtggtgatcaggtggcgcggcttgatcggcttggtgaggaagtcgtcaccgccttcgctcatggcgtccagttgcttatccaggtcgtcttcggccgacaggtagatgatcggcacgctgacgtaacggtcgttatggcggatgaccttggccagttcggtgccggtacaggcgggcatgtacatgtcgaggatgatcaggtcgggctggaagtccgccagctcggccatggcctggatcggctcgatcaaggtgcgagtgacgatgccggcactgttgagcaggcgctcggtgtgcagtgcctgggcccgcgaatcgtcgatgatcagcactttatacggttcgtactgggcaacgcaggtcagtacttcgatcttttccagcaggctggaagcttccagcgtaccggtgaggaattcctggcccccggcgcgcacggcggccaggcgggtcggggtgtcggtttcgtgcaggctgaagaacagcagcggcagcttctgttccaggccttcctgggcttcggcggcgagcttgaggcccaggccggcaccgcagaaatccacgtccatcacaatcgccgaaggcaggcgctcggccatcgacgcacgaaacgccgccacgctgtccagggattgggcgctcatgccaaagaactccaactgcttggccaggcgctcggcacggtcgtgatcggccagcatcacgtagatcggcttgcgcatcggcggcaggaaggtttgctcaagctggtcgccctggcgcaggccggtacgggacaggcgctgcatcaggcggttgagttcggtgatcagttggctgctcaggcgcccgcggttttcgttcacggccttgagagactcgccgatgtggtgcgcgagctggctgtgttccggctgttcgaaacgctcggcaaagcgcagcaggcgcagattggcctcgctgagttcggaaaggtcggtgccggaccactcgctgcgttgcaggcgctgccagatctcaagaatttgacgtgcctgatgaattacccgctgggcaaaatgctgcttgaggcgctcacggctggggtcttctggctcggtcatatcctgactactagtgagggtgcatgctgaggtcgactgatggctctatgctagcacctctttcccatgggatgagtgtcatacgtcaataaactgtgcgtgcggagtattcagttgctgacccgctggtcgctcggcgtaaaaagcgtgcatcctttatagtccaacaccctctgtgcgccagtttggcgaaaagccccgcacgggcgggcacgatggggtagggttgtggtcggagtgtttgaacgcacgccatcaattcaagtgcatgaactcaagtgattgaaaggatatcgccatgctggactggaaaaaccgtgcaggcagtgccaaaggccccgcccctgagcccaagtcggccaaccgcagctattttcgtaccttgctgatgagccgcgccgtgctcagcgtgctcggcctgtacctgttggtcacgggcgccctgggctggtactggagcgaagagccggcgctgttcccggtccagcagaatgcacagcttgccgccgaaaaagacggcaagcagatggtggtgggctttaccaccgtcgaaaccctcaagactgtggtcggtaccttgctgaacaagccgggtggctacatttccaacgaccgcttcccgcctggcctgtggatggacaacatgccgagctgggaatacggcgtgctggtgcaggtacgtgacctgacccgcgccctgcgcaaagactttgcccgctcccaatcgcaatcggccgaggatgcggatctggccaaggccgagccgcgcttcaacttcgacaacaagagctgggtgctgccgtccagcgaatcggaataccaggaaggcatcaattccctgagccgctatgaggcgcgcctgtccgacccgaaccagaagggcgcgctgttctatgcgcgggccgacaacctgaacaactggctgggcgacgtcgccacccgcctgggctcgctgtctcagcgcctgtcggccagtgtgggtcgcgtgaaactgaacaccgcgctgaaaaccgaagcgctggcgccgggtgaagtgccgcaggtcgatgaagaagtggtggaaaccccatggatgcagatcgacaacgtgttctacgaagcccgtggccaggcctgggccctgtcccacctgttgcgcgccatcgaagtggactttgccgacgtcctggccaagaagaacgccaccgtcagcgtgcgccagatcattcgtgagctggaagcctcgcaggaaccggtgtggagtcctatgattcttaacggcagtggcttcggtgtactggcgaaccattcgctggtgatggccaactatatttcccgggcaaacgctgcagtgatcgacttgcgtcagctcctcaaccagggttgatgatggacgctactcaaaaggaggccgcccaccgcgcggcttccgatgccgaactgatctgctgggtcgatgagcaggacactctgctcggcagtcttgtcagggccgatctgcgccagcgcgggttgatcggccgttgcacctttatcttcctgttcaattcggccggtgagctgtgtgtgcaccggcgcaccctgagcaaagccatgtaccccggtttctgggacacggcggcgggcgggatggtggctgcgggcgaatcctacgccgtgtcggcggctcgcgagctggaagaagaactgggcgtcggcggggtggaactggtcgaacatgaccatttctatttcgaagatggcgatagccggctctggtgcaaatcctactccgccatctgggacgggccactgcgcctgcagccggaggaggtgatggaagcgcgctttttacctatcgacaccgtcctgcaggaggctgagcaaaagccctactgcccagacgcccaggaaggcttgcgccgctatctggccttacgtcgctaaagttgcataaattggcgccatttggctcttagcaagtcggctttttgtggttacactgcgcgacttttcacccgaaccgccttggcggttcggtagcgctgcccctgcctgagtggggcttcgcggtcggtcatcctgatcgatcagtcttcatcctcccaagaggattgccggtggccaaaaaagccgcatccttcgccgcccttggtggcctggtattttccaccgacgcaggtcgacactgcccggactgtcgtcagcccgtggattcgtgtacctgcaaacagaccctgatccccgaaggcgacggtattgcccgcgtgcgccgcgagagcaaaggccgtggcggcaagacggtgaccaccatcaccggtgtgccgctggccgaagatgcgctgaaggaactcgccaccacgctgaaaaagcgttgtggcaccggtggcgcgttgaaagacggtgtcatcgagatccagggcgatcacgtcgagttgctgttggccgagctgatcaagctcgggtacaaggccaagaagtccggcggctgaaagcctcttcccgacctgtgtctaaactctgtcctgcgcgtggggtcctaccttgcacgcaggcaaatcgtcattttcattctttagactgcgccagcctcaaccaggggcggcgctttcgccttcatttataggggacttcgatgtccgtacgacgcacacgcaaagacgatggcagccaatggacagttgcggacagccgcagtgtttacgggattcgccattggggggccgggtatttcgcgatcaatgaagccggtcgcgtagaagtccgtccgaacggcccgaacagcacgcctgtcgacctgtacgagcaagtcgacgaactgcgcaagagcggcctgtcgttgccgctgctggtgcgcttccccgacatcctgcaagaccgtgtacgccaactgaccggtgctttcgattcgaacatcgagcgcctggaataccagagcaagtacaccgcgctgtacccgatcaaggtgaaccagcaggaagcggtgatcgaaaacatcattgccacccagaacgtgtccatcggcctggaagccggctccaagcccgagctgctggcggtattggccctggcgccgaagggcggcaccatcgtctgcaacggttacaaggaccgtgagttcatccgcctcgcgctgatgggccagaagctcggccacaacgtgttcatcgtgatcgagaaagaatccgaagttgagctggtgatcgaagaggccgccagcctcaaggtcaagccacaggttggcctgcgtgtgcgtttgtcgtcgctggcgtcgagcaagtgggcggacaccggtggcgagaaatccaaattcggtctgtcggcggcgcaactgctgtcggtggttgagcgcttccgtgcggccggcctggaccagggcatccgcctgctgcacttccacatgggctcgcagatcgccaacctggccgactaccagcacggtttcaaggaagccattcgttactacggcgaactgcgcaacctcggcctgccggtggaccacatcgacgtcggtggcggcctgggcgtggactacgacgggacgcactcgcgtaacgccagctccatcaactacgacatggatgactacgccggcgtggtcgtgggcatgctcaaggagttctgcgacgcgcagagcctgccgcacccgaacatcttttccgaaagcggccgttccctgaccgcccaccacgccatgctggtggtgcaggtcaccgacgtcgagaaacacaacgacgaaatcccgaccatcgaaaacaaggaagccctgccggaaaccgtgcagtggctggtggacctgctcggcccgaccgacatcgagatggtcaccgaaacctactggcgcgccacccactacatgagtgacgtggccacccagtatgccgacggcaaactgaccctggccgaaaaagccctggccgagcagtgctacttcgccgtatgccgccgcctgcacaactcgctcaaggcccgccagcgctcgcaccgccaggtgctggacgaactcaacgacaagctggccgacaagtacatctgcaacttctcggtgttccagagcctgccggacacctgggccatcggccaggtattgccgatcctgccgctgcaccgcctcgacgaagagccgctgcgccgcgccgtactgcaagacttgacctgcgactccgacggcaagatcaagcagtacgtcgacgagcagagcatcgagaccagcctgccggtgcacggcttgaacgaaggtgaagactacttgctggggatcttcctggtgggcgcctatcaagagattctcggtgatatgcacaacctgttcggtgataccgattcggtgaacatctaccagcgtgaagacggttcggtgtacagcgccggtatcgagacccacgacaccatcgaagacatgctgcgctacgtgcacttgtcgccggaggagttgatgacgcactaccgtgacaagtgtgcgagcgcgaagatcagcgccagtgagcgtacgcagttcctggatgcgttgcgcctgggcttgacccggtcttcctacctgtcctcgtaaaaaatgtgggagggggcttgcccccgatagcggtacatcagcaacacttaagttgcctgatccaccgccatcgggggcaagccccctcccacatttgacgcagtgctgatcctgaaattgtctgagggctgagcaatgttgagcaaatggccgcaagtgttcaccctggcagtggccgcattcttggccgcctgctcccccatcaaagtcctcaacgccctcaccccttccagcaccttcaccaagaccgcggccatcgcctacggcgctgatccgcgccagaaactcgatatctaccgtcccgctcccgccatcgccaacgcgcccgtcgttgtgtttttctacggtggcagctggaacagcggctccagggacgactacggtttcgtcggcgaagccctggcgtcacgcggtattgtcgtggtgattgccgactaccggctttatccccaagtgcgttaccccgcgtttctccaggatggcgctcaagcggtggcctggacccaccagcacatcgccgaatacggcgctgacccgcagcggctctatgtgatgggccacagctccggcgcctataacgcgtcgatgttggcgctggatgcgcgctggttgaatgcggtgggcttatcgcctgccattttcaaaggctggatcggactggccgggccgtatgattttctgcccattgaaaataaggacgtacggccggtgttcttcttccctgactcgccgcctgagtctcagccgatcaaccacgtcagtgccgatgcgccgccgagcctggtaatggcgtcaacggacgacaatctggtcaaccccacgcgcaatactggcggcttggctaataagttgcgcgcggccggcgtgccggtagaagcgttttacttctccaggaccaaccaccagacgctggtggcctccctgtccaggccgttgcgttggttggcgccggtgctggataaggtcacggcgtttatccaagccactgatcctgccggttcaagcgccaggcaatcgcccacaaagtaaggctgcgcagggccatgaacagcaggaagcttatccacaacccgtggttgccgaacccctgcaacgcccaggcaaatggcagcaggatcaccacggtcagcaacatgccattgcgcatttcccgtgcacgggtggcgccgatgaacagcccgtccagcaggtagctccacaccgcaatcaagggcaacacggccaggtagggcaggtagatatcggcggtctcgcgcacgctggggatatcggtctgcatggcaataaacaaatggccggcgaaggtgaacaacagggcaaagccgacgctggcaatcaacgaccaaccgcaagcgaccactaatgaacggcgcaaggcctggcggtcatgggcgccgatggcgtggccgcacaaggcttccaccgcatgggccaagccgtccagcgcatgggccgtcagcaacaggccgttgagcagcagtgcattagccgccacggtggcgtcgcccaggcgtgcgccttgcaccgtgatcatgaaaaacaccgattgcagcgcaaggctgcggatgaagatgtcgcggttcaccgccagcaacgggcgccagctctcccatagtttcagtgctgcccaggcgatatggccggggtaggcgcgcagggctttttgcgtcatcgccaggcccagcaaggcgccggtccattcggcgataacggacgcccgcgctgagccgaccaccccccaatccagacccagcacaaaccacaggttcagggcgatgttgaccagattggtggtcagcaggatcgccaacggcgcacgggcgttctgcgtgccgaggaaccagcccaccagtgcatagctggcaagggcggcaggcaggccgaacaggcgcgtgtggaagaagtcccgggtcagttgattgagttcgggtgagggttgcatccattccaatgccagatgactcagcggaatacccacggtgcccagcagcatggctaaccccagcgccagcagcaggccttgcaggaggatttgtcgcaacgcggccccatcattgcgcccggcagcttgtgctgcaaaaccggtggagcccatgcgcaggaaacccatggcccaggccaggaaggtatacaggctggccccgaccgccacggcgcccagttgatgggcgtggggcaggtggccgatgaccatgctgtcgaccagggccacaaggggcaccgagatattcgacaggatcatcggcgcggccagggcccagacgcggcggtgggtggggcggtggcgccagtcgatgagtagggtgggcatgggggctccttgggggagcggcattgtaacgggccctttatctcactgcagaaccaatgtgggagggggcaagctccctcccacctttggatctccagtgtttgtgggatttggctcgacattgcgtcccatcaagaaccaaagcaccctccgtcggtcaatgtgaccagcaccacatcggccccgtgcgggctgatatatagttcacccttcggacccctctcacaacgagtgccccatgtttaacaaaggattgttcctggcctgtgcgctggccctgctgagcgcctgcgattcctccgataaaccggcagccccgactgctccagccgcggcgacgattgcaccccagccggccaaggcggcggtcgacgtggcggcgctgaagcagcgctatgccgggcgtgagttgagtgtggtggacgtgtccgaagtgcagctcgatggggccagcaccctgtccgtgagcttttccattccgctggaccccgatcagaagttcgccgacaaactccacctggtggacagcaaatccggcaaggtcgatggcgcctgggaaatctccgacaacctgatggaactgcgcctgcgtcacctggagccgcagcgcaaattggtgctcaccgtcgatgccgggctgaaggcggtcaacggcaacacgctcgccaccgagtacggcgcccgcctggaaacccgcgacctgcaagccaccgtcggcttcgccagccgtggcaccttgctgccgacgcgcctggccgaagggttgccggtgatcgcgctgaacgtcgacaagatcgacgtcgaattcttccgcatcaagcccgaatccttgccgaccttcctcgcgcagtgggggcgcaacaccagcctgcagagttatgaatcccgcgaactgctgccgctggccgacctggtctacggcggtcgcttcgacctgaacccggcgcgcaacacccgcgaaaccctgttgctgccgatcgccggcctcaagcagttgcagcagccgggtgtgtacctggcggtaatgcgcgcctccggcacttataactattcccagccggccacgctattcaccttgagtgatatcggcctgtcggtgcaccgctacgccaatcgcctggatgtgtttacgcaggcgttggaaggcggcaaggcactggacggcgtcgaccttgaagtgctcgacgccgagggccgtgtggtcggccagggcaagaccgaaaagggcggccacgccgagttgccgttgccgaaaaaggcccaggtgttgctggccaagcagggcgagcagaccagcatgctgcgtctggacagcgccgcattggacctggccgagttcgacatcggcggtcagccttcccaccccttgcagttctttgtcttcggtccgcgtgacctgtatcgccccggcgaaaccgtgctgctcaacgccctgctgcgcgacaaggatggcaatgccgtcaaaccgcagccggtgagtgttgaagtgcgccgcccggatgaacaggtgagtcgcaaattcgtgtgggatgccgacgcctccggcctctatcaatatcaactgcaattggccggcgaagccccaaccgggcgctggcagctggtgttcgacctgggcgatggcaagccgcaactgtatgaattcctcgtcgaagacttcctgcccgagcgcctggcgctggaactcaagggcagcgataccccattgaacccggcggataacccggtgattcaagtgaccggacgctacctctatggtgcgccggcatcgggcaaccgggtcagtggacagatttatgtgcggccgttgcgcgaagcggtcaagtcgctgccgggctatcagttcggctccgtcactgaagaagagctgagccaggatttcgaactggacgaaagcgtgctcgacgccaagggccaggaagcgttgaccctggaaagcaaatgggccgaggctaagtcgccgctgcaactgatcgtgcaggccagcctgcacgagtcgggcgggcgaccgatcacccggcgcctggtgcagcctatctggccggccgagcaactgccgggcctgcgcggcttgtttgacggcaaggaaaccaacggcgatggcccggcggaattcgaagtgctgctggccaaccaggacgggcagaaactcgccgcgccaaacctcaaggtgcgcctggtgcgcgagcgccgcgactactactggaactactccgagagcgatggctggagctaccacttcaacgagaaattcctcaacctcgacgaacagaccctgaacatcaaggccggcgacacggccaaggtcagcttccagctggagtggggcccgtaccgcgtcgaggtggaagacccgcagaccggcctggtcagcagcctgcgcttctgggccggctaccaggcccaggacaacactgaaggcggcgccgtgcgccccgatcaggtcaagctggcgctggacaaaccggcgtatggcgacggcgataccgccaatgtcaccgtcaccccgcccgctgccggtaaaggctacctgctggtggagtccgccgaagggccgctgtggtggcaggaaatcgatgtaccggccgagggcaaaagctttgcggtgaaactcgacccgaaatggtcgcggcatgatttgtacgtcagtgccctggtgattcgcccgggcgagcgcaaagccaacatcacgcccaaacgtgccgtgggcctgctgcacctgccgttggatcgcacccagcgcaaactcggcgtgaccctcaccgcgccggaaaaaatgcgccccaaacagccgctgacggtgaaagtcgccgccaaaaacgccgatggcagtgtgccgaaacaggtgcatgtgctggtggctgcggtggacgtgggcatcttgaacattaccgaatacccgacgccggacccgtactccagcctgttcggccgcaaggcttacggcgtggaccagttcgatatctacggccagttgatcgaagccgggcaggggcgcttggccagcctggcattcggcggtgatgcggcgctggccaagggcggcaagcgcccggacaccagcgtgaccatcgttgccctgcaaagcgcgccggtgaccctgaacgagcagggcgagggcgaagtcagcgtcaatatccctgacttcaacggcgaactgcgcctgatggcccaggcctggaccgatgaccgctacggcatggccgaagccaagacggtgatcgccgcgccgttgattgccgagctgtcggcgccgcgcttcctggccggtggtgaccagaccacgttggcaatggacctgtccaacctgtcgggccaggcgcagaagctggatgtgcaactgagcgccgaagggcagttggagttggtcaacgctggcgcgcaaaccgtcgagttgaaacaaggccagcgcaccaccctgcgcatcccggtgaaagcctggggcggtctggggcagggcaaggtcaaggtcaccgtgaacgggctggacctgccgggtgaaaacctgccgccgttcacccgtgaatggacgttgggcgtacgcccggcgtacccggcactgctcaagcattaccgcgcggtgctcaaggatcagccgtggagcctgccggcggacacgctcgatcagttcgactcatcagggcgccaggcgctgttgagcctgtcgagccggccgccgcttaacctcggtgcgcagatcagtgcactcaaggcctacccttatggttgcctggagcagaccgcgagcggcctgtacccgtcgctgtatgccgacgatgcgctgctcaagcgcctgtcgatcaagggcgagtcggacagcgaacgtaaacgcaagatcgagctgggcatcgaacgcttgctaggcatgcagcgctacaacggcagcttcggtctgtggggcgccgatggcgaagaagaatactggctgacggcctacgtcaccgacttcctgttgcgtgcccgcgaccaaggctttgccgtaccgccgcaagccttgaagaaggccagcgagcgcctgctgcgttatgtgcaggaacgcaacctgatcgacgtcgactacagcgacaacgccgaccacacgcgcttcgccgtacaggcctacgccggcatggtgctggcgcgcagtcaacaggcgccattgggggcgctgcgcagtattttcgaacgacgcagcgatgcacgctccggcttgccgctggtgcagctggctatcgcactgcagaacatgggcgaccagccgcgtgccgaccaggccttgctcgcggggttggcgacgcagcgtaacgccaatgagtggctggccgactacggcagcccattgcgggaccaggcaatgatcctggccctgctggaagagaacgacctggccaagggcaagcgtgaggagcgcttgtttatcctctcggatcagttggcggccagcccgtacctgtcgacccaggagcgcaactcgctgttcctggccgggcgcctcgggtttgccaagccagaggcgaactggcaggtgtcgctgaccggcagtggcggcgtgcaggcattgagcaaccaacactcgacgctggaattggagggcaagctgctgtccagcgatctgaccttgagcaatcagggggacgcaccggtgtaccagcagctgacgatctcgggttatccacaggtgccaccggcagccggtggcgacaacctgagcatccgccgcgaatacctgggcatgaacggccagccgctgaacctgcgcaacctcaacagcggggagctggtactggtgcatctggcggtcagcgccaagcagcgtgtgccggatgccctggtggtggatttgctgccggccggcctggagctggaaaaccagaacctggcgcaaagcgccgccagcctggaaaacgccagcagccaggtgaaggaatggcgtgagtcgatgcagaacgcctcgctcaagcaccaggagttccgtgacgaccgctacgtggcggcgatcaacctggacggctccggcaccacacacctgctgtacttggcgcgggcggtgacgcccgggacttatcgtgtgccgccgccgcaggtggagtcgatgtaccggccaaattggcaggcggtgggggagacgccggcggatctggtgatcaagggacgttaatgtaaaacggggcctcaatgtgggagggggcttgcccccgatggcggtggatcagtcagcttatctgtagctgacccaccgctatcgggggcaagccccctcccacaggtgattttcggtgttttgggatcagtggacgacccagctcagaagccacaggcccagcagcagccagatgatgcccatgatgatcgacgcccgcatgaaggcgcgcaccgccgagtacagcagcatcaggccgacaatcagagtgaggatgctgatgatcgaggtgtccatgcccaaggtgcgggacaggccttcgacaaagttgccaccggcgtgggtcagcgcaccgaacaggccgctgagtccgtcgacgataaagcggatgatcgaaccgagcgcctggcccaaccattcgaaaaagctttctacctgcatgtgtgtgtcctgatgagaaggtgggcgtatctgtgcctttggttgttattgcaacaggctagttccctaccagcatagaggtttgcccgtttgagtttgcgtttagttgcccgctggaccctggccagccttttgttggtgatcgccctgctgtggctggccgatcgcatctggccgttgcccctgcccaaagatgacctggcgcgggtggtgctggccgaggatggcacgccgttgtggcggtttgccgatgccaacggtgtgtggcgctaccccgtgcagaccagcgaagtatctccgtattacctggatgcgctgctcacctatgaggaccgctggttctaccagcaccccggcgtgaatccgctggcactggtgcgggcgacgtggcagaacctgaccggtgcgcgggtggtgtcgggcggcagcaccttgtcgatgcaggtggcgcgcttgctggatccgcattcgcgcaccttccatggcaaattgcgccagttgtggcgcacggcacagctggaatggcacctgtccaaggaagaaatcctcaacctctacctgaatcgcgccccgtttggcggtacgttgcagggcgtggctgccgccagttgggcgtacctgggcaagtcgccgtcacagctgacccacgccgaagccgccttgctcgccgtgctgccccaggcgcccagccgcttgcgtccggaccgccacccccaacgcgcccaggacgcccgtgacaaagtgctgcgccgcctcgccgaattccatgtgtggccgcaagctgccgtcgatgaggccctggaagaaccgctcttgcttgccccgcgcctggaaccgagcctggcgcccttgctcgcacggcgcctgaaccgcccggacagcccgccgctgatccgcaccaccctggacgccaccctgcaacgtcgccttgaagacctgctgttgggctggcgcgcgcgtttgccggagcacacctcggccgcgatcctggtggtggaagaggaaaccatggccgtgcgggcctacctcggctcggtggatatcaacgacgtcaagcgcttcggccatgtggacatgatcagcgccctgcgttcgccgggctccaccttgaagcccttcctttatgggatggcgctggacgatgggctgatccactccgaatccctgctgcaggatgtgccccggcggtatggcgattaccggccgggcaacttctccatgggctttaccggtgcagtgccggcgagtacggcgctgtccagctcgctcaacctcccggcggtgcagttgctggaagcctacgggccgaagcgcttcgccgccgaaatgcgcatcggcggcgtgcctttggcattgccggcgttggccgagccgaacctggcgctgatcctgggcggtgcgggcagccgtcttgaagacctggtgagcggctacagtgccttcgctcgagacggcaaaagcgccacccttcgattgcaaccggacgacaccctcagagagcggccgttgctgtcgccaggctccgcctggattgtgcggcgcatcctcagcggccaggcgcgacccgaccgcgacccgcgtgccgagttggtgcagcgcccggtgctggcctggaagaccggcaccagctatggctttcgcgatgcctgggcgatcggtgtggggccgcgttacttgatcggcgtgtggatcggacgcccggacggcacgccggtgccgggccagttcggcctggcctccgccgcaccgttgatgttgcaggtgcacgatgtgctgaccaaccgcgacagccagcgcggtatcactgcaccggtcaagctggtgccggcaaatgtcggtgtggccgcgatctgttggccgctgggccagccgatgagccgcagcgatcccaactgccgccgccagcgctttgcctggacgctggacaacaccacgccacccactttgcaggcgttggaccagccgttgagcgtgggcttgatggaaagtgtgtgggtcaatgccaagggcttgcgggtggacgctcattgccctggcgccgagcccaggagtatcgccctgtggcccgcgcccctggagccttggctgcccagggccgaacgccgcgaagcgcgcattcccgcggccgaccctgattgcccgccaccggcgctggccgcgtcctcacctttatccatcgttggcgtacgtgaaggcgaccaactgcgcctgcccgctgccagccaacaggcgctgcgcctgaaaatctccgccctgggcggcagtggccggcgttggtggttccttaacggcgcgcccctgggcgacagcgccaaccaggactttatcaacgccagtttcgaacaacttgggcgttatcaactcagtgtcctcgacgaagccgggcagacggcgcgcatcgagttcagcgtcgttgattagatcgctatcgggggcaagccccctcccacactgggatgtgttggtctatcaaaggtgggagggggcttgcccccgaaggcggtctgaaggttcacttgccttcaaggccattccccccgaagctatccaccttcaggagcctgccgcatgaacctcgaacacctcaccgaacgcctgcaccgcatccgcgataccaaccactggaagccgttccacagcccgaaaaacctggccatggccgccagcgtggaaatggccgaactggtggaaatcttccaatggctgaccgaagaccagtcgcgccagctgccggccgacaaactcgcccatgccgggcaggaagtcggtgacatcgtgctgtacctgctcttgctgtgcagtgagctgggcctggacatgaacgaagtggtgcgcgccaaactggccgacagcgaacggcggtttgcccatgagtgaccgtcatttcgaccagttggccacgcgcttcgccgagaaaatctacggcggtgccaaaggcgcgatccgcctggcagtgctccaggccgacctcaccgaagccctgccaaagcgcccgctgcgtgtgctggatattggcgcgggcctgggccatatgtcgctgtggctggctgaacaaggccaccaggtgaccctggccgaaccggccgaaccgatgctcgaaggcgcccgccaacgtttcgccgaggcggggcagaccgcaacgtttatccatgcaccctggcaagacctgctcggccagctcaccgaaccctacgacctggtgctgtgccacgcggtgctggaatggctcgccgaaccccatgcgatcctgccggtgctgcaccaactcacggcgccgggtgggtggttgtccctggcgttctacaaccgcgatgcgctgatttatcgcaacctgctcaaaggccacttccgcaaaatgcgcaagaatgacatggccggcgaaaagcagagcctcacgccgcaacaaccgttggacccacgagaattggcggcgcaactcgaaggcctttggcaggtcgaaagccaaagtggcgtgcgggtgttccacgactatatgccggtggaattccaggcccgtgcggatttgcaggatcttttggagatggaactcgctcaccgtcgtcacccaagctttgccggacttgggcgttatttgcactggatctgccgtccggtttaagcggcccagtctgcggaggtcgaaatgcgtcgtctctgtttgatcctgttgtccctggggttgggcgcctgttcaagccccaatccttatgttgccgcgtcggcgccgatcccaccggcgccgccccaggcggcccacacctttgatgccagtgcctacccggcgccggtgcgcgattacggcgcctaccgcaattgggcctggcgcaacggccagcttccagcgggcacggcctgggccgattcggcgcagattgccgaagcggtcagcggcgccctcgaccagcgcggcctgcgccccttgcatgacaatcgcccggcggacctcttcgtcagcgccgacgtgtgcctggagaagcgtctcaagcaagtccaggatgactacggctacggttacggcggctacaaccgctatggcaatggctatggcatgtacaactcggtgccgatcgtgcgcacctatgaagtgcaggtcgtggtggtgcgcgtcaacctgttcgatgcccgcaccggccagccggtgtggagtgccagcgcagagacgggcagccagggcagcctcagtgagcggggagatgccttgcgccaggcggtgcagaaggcaatgacggcgtaccctcccagttaaccgctattctcatctttagcgcgggtcgctctttggagaacaaccatgtttcgtcgtatcgctacgctcgcttttgttgtgctgcttggcggttgccagaatgcccaggtcaaccacgattttgacgccagccgggatttcggcgcctaccgcagttgggcctggaaagacccggccctgcaatatcgccccgatgacccgcgcatcaagagcgacctcaccgaacagcgcatccgccaggccgtgggtgaacaactcgaccagcgcggcctgcgccctgcggcgcctggcaccagggctgacctgaacgtgcaggcctacctgatcgtcgaagaccgccagcaacaggtcaccaccaactacggcggcgcctggggcggcccgtggaatggctattggggcgcgccgatgtacaacgaaacgcgcaacatcacctacaaagtggcgaccatccagatcgacctgctcgatggcaaggacggcaaactggtctggcgcggcagcgacgaacagatgatggccacctcgcccaacccacaggaccgtgacaaagccatccgcaccaccgtcacccgcgtcctctccagctacccccctcactaacccctttaggcgcaggctcgccgtggtgagcaggcttgctttggccagcaggcttgctgtggcgagcaggcttgctgtggtgagcaggcttgccctgcgttgggctgcgaagcagccccctaaaaccgatttatggcaacgggccagcccttgtctacactcaaaaccatctacggagagtaagcgctaaggagtgcctgatgtctccccgacttggtgacaggcagcgtggtgcaattggcctgatggcggcggctaccctggcgatggccatggtgttcctgctgctggcggtagacagcggccgtctctacctggaaaagcgcaagctgcagtccgttgccgacagtgccgcgctggaagccgcaagccgtggcggcctgtgcacacccaccaccaccgccaatgactacgccgtgcagaacgccacacgcaacggcttcaccgtggtcgccggcgacaacagccgtggcctggccgtgacctgcggcacactgaccaccaatgccagcaatgtccgcgtgtttgcggccgatgccaccaaaaacgatgccgtccgcgtggtcgccacccgcagcgtgatgaccagcgtcgccagtgggctgtggaacatgttcagcggcgcgccgatgtctacccaaatggtgctgagtgccactgccgtggccgcctatgcaccgccggtggcgcaactgacgattcgcagcagtctggcctcggtgaactccggcaactccccgctattgaacatggtcatcggcaacctgttgggcggcagcctgtccctgaccgcagcgggctggaacggcttgctgacgacgaacgtcaatctgctcagttacctggaccagttggcgattcaattgaacgtcaaggcgggagactacgacgcgttgctgagcactgcggtatccgccagccagttgatcgacgcggcggtgaaggtcctgcaaaaaaacggcgcggtcgccacggcggtgatcaacgacgtgattacagtgaaagccatcgccccgaatacccagctgttgaaggtgggcgatctgttgaaggtcgctaccggtacaccagcggctgccttgaataccagtgtgcagttgtttcagttgctggagaccgtggcgcagctatccagtagcaaaagtgcggtcagtgcggcagcgcaggtgaatattcctctggttggcaccgtctcggtccagaccaaagtcatcgaaccgccgcaactgtctgcgtttggcaatccggccaaggccaaggctgggctgttgaataatccgccgacggaccagatttttgtacgaactgcccaggtacgcacgttggtcaccatcgatgcacccatcatcaaggtggtctctggggtttcctcgatactgaccgggctggcgacgcccgtgtcgaaggtggtcggcggtttgttgaacctgaacctgctcgatgtggtggccggtgtcgtgtgcatagtcgggtgcaatgtggctgatgtggatatcaccacgaccctgtccatctatatcgaggcggccagtgcagagagccacgtgacagacttcagttgcgccaccccggccaccaagtcgttgacggtgcaggccaccacctcactcgctaccttgggcgtcggctacgttgacccggtgtcggcgttttcatcgtccttgcctgtcaatgtgcagccggtgcggctgatcgactttggccaacgcttttgcctgctgaccctggtgtgcgggccacgcaccgccggtgttggcggtggcttgaacctgagggcgttgtccaccgtgggggcgcaaaccaatacggtgttgttttcgccggtgaatgacatcaatgcggcgacgatctacaaaagcccacccggcaccgccaatatcgttaacagcctgggggctaccttgagcggcttgcaggtgacctatgtcccacctaccggaagcacgcccggtgcgccgaacagcacagtcaccagtgcactggcgaccatcgtcaactcggtggtcagcctggtccagaacgtcctggcgccgatcctcgaccctatcgtcaacacgctgctcgcagccctgggtgtcaacctcggcaatgccgaagtcggcgccaacctcagttgccacatgggccgcgcctacctggtgatctagctgatcggcaactccacacaaaacttcgcgccgtgctcaccattggcgacgctcaggcgtccgcccatgttttccacaatcccataactcaccgacaaccccagcccggtgcccacgccaatcggcttggtggtgaagaacggttcgaaaatccgctccagcagccgtgggtcaatcccgccgccgttgtcttccacccagatccgcacatggcggctgtcgtgctcgcaatgcaccgcgatccagggacgaaattcgggatgtttaccccgtttgctcaacagcgcgtcacgggcattgaccatcaggttgatcaacacctgttcaagctggtcgacatagcctttgacctggacctggaagtccgccggggtgatccgcacctccacccccttgccgcgcagaccctcgccgagcagtgacagcgtgccgtccaccgcctgcgacgggtcgaaaggcagttgttcgatttccgagcggcggccgaacacccgcatatggtccaccacccgcgtggcgcgctgcacctgggcatcgatgcgctggagtttttcgatgaggtagtcgatctgtgcatcgccattgcccagacgcttgagcacattgacgatggccatgcgcatcacgttcagcggctggttgatttcatgggccaggccggtggccatttcacccagggtggccatcttggcgctttgcgtcagttgctgctgggagcggcgtacttcggtgttgtcacggcccaccgcctgcacttccaccagcgtgccctgttcatcgaacacaccacggtccgaccagacccaccaggcgtgttcgcgtccaggcaattccaggctgatttcggcggtgctgaccgggaattccggggttaactgttcgatgcgttgcacaaaggcctggcgttgttcgtccgacagccagtgccccaggttcagccccggcaattgcgcgggcaggcattccaggtagttggccagcggtgtgttgccgaaggtcagggtcaggtcggggcgatagcggcagatcatcgccggggagtcttcgaccaggatgcggtagcgttcttcgctctgcctgatttgctcggcggccagggttgcctcggtgacatccagccacaggccgacggcttccaccggcaggccgaggtcatcgcgcagcaacttggcttcgtccagcaaccagtggtagtggccctgtttgtcgcgcaggcggtagcgactgcgtacgctgccttcacgtagtaattggcggctgcgctcgaagtacagctcgcggtcttcggggtggatcaaggacgccaggctttcgtggttgcactcggccaaggtccagcccagcagcggtagcaggctgtcgctgaaaaaggccggatgcagggcgccgtcgacatagcgctgcacatagatcacggccggtgagctggcgatcaggttgtccaggcgcgcatgggcggcggcggcttgcagttgctggttcttgatgtcgctgatgtcgagcatgaaaccgatccagcggcggctgtcgcccacgcccagcacctggccctgcacgcgataccagagcgggtggtgctcggcgtcggtgcgttgcaggcgcacgctggtcagcaagggtttgcccagggcctgcaggtcgtgcagacggctgtcgagggcctggcgatcggccgggtggatcagttccagccactggctcaggggttggcgggtaggaccgtcttccaggctgaggctgtgcagcaactgcggggccagctggatttcctgggtggccggcagcagctcccaccagccggtgccgagcaggccctgcaacgcctccatacggtcgagctgctggtgatagcgctgctcgcgcagccggctcagcaggggcgcggcgagggcggcggcaaggttgagccagtcgcggtcgcgggtgtgttgctggccgttgtattggccacagagcaaccaggcggcgacgccctgactgtcgcggtagggcaccaggaaaccgtcggcatcgccgaagatactgtgcaggcgtgggttatcgctgcgctcctgggccaggctcaacggtgcattgccattgacgctgtccaggctgatccccaggtgttggccggcctgccacaaggcgggggcgtcgtgggcggcgtactggctgtagatccgccagccgtggtcttcgtcatcgagcaaggccagggcaacgcaggggatgtgccagcgctgggccaggctgcgcaggtgctcgttgaacacctcgggcaggcgggccaggctgcacacccgcaattgctcgctcatctggcaggcgagttgatggttctgttcgcggtgctgggccagttgccggccggcgagcaaatcgccaacgtcctgcaggcgcaggctccaggcatcaccgtcgggttcgatccagccgcgggtatgcagcacctggccggttgcggcctggaagtccaggtccaggccctggtgttgccagtcggcggggctgccttcgatagtcaaggcgctgctggcgcacagcagttcatgcagtggtggccggcgctcgccgatggcgtgcatcgcgagctgtgggcgcaggctgccactgatgctcagcacgtggcctagagcatccaattgcacctgcagccctggcaggggcacacccggcatgtcgaggggcggcgcgctggcgcgaccgagcaggcgcccgaagagtttgtcccccgacgtcaaaactgcagactcgaactggcggagaggttggccggcaggttcgggacggtgccgatccccggcagcaccagtgccgggaacacggaatacaggttggtagtggggtagttgatcgccacggtcaacgtggtgccgttgtaggtgctgctgatgtaactgggggagaactggaagctggaagggatccagctcaactgggtgatcacggtgtttttggcgcggtcggtcacctgcgtcccgtacgcggtgccggcggctatcgggtccaccgacagggcctggcgcacggcctccgccgccgcctggttgaacgactgcatcaacagcaacggcaggctatagctgatcaacccgtagaacacggcaaaaaagatcgcgaagaccagggcgaactcaatcgccgccgcacctttttgctttccaggcaggcctgttttcatgactgcgtctaccctgacggctactacttgatatcagcatagaatcattcagcgaaaagggatgttttttacgtgatccatggcgtggtgattctgctctggctggggctctgtgcgttgcaggatatgcgtcagcggcaaattgccaatggcctgaccctgggggcggcgctgctggcgctgatcttcttgctgtggacgggcacgacctggctcggagcgcccgccagcgagggcggcagggccttcgccctggccttgctgctgaccttgcccggctatgcgctgggccgctttggcgcgggggatgtgaagctgctggctgcgctggccctggccagtacgctggactatttgctgtggtcgttgatcggtgcggcgctgtttcaggcgtgctgggtgcttgtgagtcaaaggcttagggcgcgtcgggggaggacagatgtgcaggtgtcaaccaaacagccctttgccccctttgttttgacaggatttgtgctgtgctggctttggatccattagtcgaacaaccgctctgccgctatgtacatagtcggaaagtgcgtctacgtttatgtagtatccggatgttttttttgtccaaatggatggggcgccctttggcttgccaggcatggagtagcgcgtgaacaagcttacctcggcggtaaaagtgctcgtggtcgacgatcagccgttgatcgtggaagagctctgcgaatttcttgaaggcagcggttaccgctgcgtcccctgtgagtccagccgacacgctttgcagcgcttcagcgaagacctcgagatcggcctagtgctgtgcgacctgcatatgccggacatggatggcatcgaactggtgcaggccatgcagaaggtcgcgggcaagcagcgcgcgttcgaggccatcatgctcaccgggcgtgccgacaaacaggacgtgatcaaggccctgcgcgcggggatctcggattactaccagaagccgatcaacctcgatgagttgctcgaaggcctgcaacgccaggaagcggcgctggaggagcggcaaaaggagctgcacctggggcacctgaaccagaagctgcaatacctttccgaatccatcaacgatttgtaccaggacctcgacaaagtgcggcgcagtcctggcgccggcttggcggatgagggcgagccggtcgtcgatgatgccgggccgatcgaaatcccgaccatcttcaaccagctgtcgccgcgccagctcgatgttgcgcgcctggtgggcaagggccagaccaactaccagatcgcctgtgaactggggatcaccgaaaacaccgtcaagctgtacgtgtcccaggtgctgcgcctcacccatatgcataaccgtacccagctggcactggccctgtcgccggctacctcggcgctgcggcaacgggtgacggcgcactgacggttactgactcctcccacccttggacgacccgccggattgcgactcgaagaactccggaattggatgtttgttgctgtccaaccaacgctgcaaggcctgctctcgttctgcgggcgtggtccgttgtggcgtggcggaagctgcgcgcccatcgacctgcaaggccatccagttttcggtctccgcctggtagggggacgatgggccaggttcgatggccagtgcgctcaggggtagcagcgccagtgcgatgaagtagtgtgctttcatcttgctctccttacttgagggtcaccggcagggtttcgctgaccgctgcgactttgcgtgtcgccacgccggaggccttgagtttctccgcgcgggcctgggcctcggtgaactgttcgcggctcaggcccaactggctgacaaccttggccgcttgcccccagtcattctggtaaatcaacagcgtgaccaggttgacggccgccagcgggtcgccttgcttgagttcgatggcggtcatgaattcaaagcgggcgtcttccacccgtagttggttgaggtacaccacgcccaagtcattgcggatcttttcgtcagtgggtgccagctgcgcagcccgttgcaagtgagtcatggccaggccgttgttgcccctggcggccgccaattgcccgaggccgtgctcgccttcggccgtcatgcaggtgccgagcaggctgcggtacaacggctcggcttcgctgcgcccgagcaggcgataagtgcgggctttgcgctggcgcacctggggcagtgactcgggcaggttttgcaggttggccaggctggcgtgcagcttgccttcgttggccaggtcatcggacaggttcagcgccagctcctggtccgcgctcggcttggcgcaactgccgggtgaggtcagtgccgcccagggtgattggccgttggtggcgcagccgccgagcatcaacagtgtcaggccggcaatcagtgctttcatcaaggtctcctcaaaagtggctcaacgcgcgggcgatgccgataaaggccgggccgccgagcacgatcaacaaagcggggaacagaaacaccatcatcaccaccgacatttttgccgacatcttcgagatgtattcctgcaagcgggtcaggcgtcggtcgtcgagcagttgcttgagggccagcagggacttcatcgcgccgccaccctgctggatcaattgctggaggatgatgcaggtgtcggtgaactcatctacctccagcaggcgcgcggtcttgcccagttcctcgctcagctccagcccggaatcgacccgtgccaggatcagacgcagttcatgggtcagtgcaggcagcaggcgctgcgcttcgttgcccaccacccgcagcgactgttcaatcgccatgccggattcgaacaggatgcgcagcagtggaatgaaggttgaaatttccttggcgatggtctgctggcgatacttggccgcagcggcgagcacacgtttgggcagcaggtagccgatgcacagggcaaacatcggcgcaatccatgcggggtccgcgtgtgggaacagtatctgctggccaagcaaggtgagacccagcagcacaatcggtgtaccgacctggaaggcggcgaacagcgaacgctggctggccttgcgccaacccacgcggttcagcagggtctgggtctcgttgtccaggctgaccgaacgctgtgccaggctgctgccgcccagttggcggatgagcgtggcgagtttgtcatcagtgcccatccgcccctgcaagcgctccgtgaccctgcgctcgcgccgccggttttcgagcaactggccacccaccaggacggcggcggcgagcaacaacaaggcgaaggccagcagtgccatctcaaacactcctcagcatgcgccacatggccagggtcccggccatgtccatcgccaatgccacgaagagcagggtgcgcccggtgccgtcgttccacatggtcatcaagtattgcgggttgaccatcatgaagtagcccacgatcaggatgggcagcccgcccagcacataagcggtcatgcgcgtttcaccggtcatggccttgagttgcctcgcgccttgttcgcgctcgcggatcatcttgatcaggttttccagcagttcgctggcgttgccgccgtagcggtggttgaccttcaggccgagggcgaacaggcggaattcgtcctgctcgtagaactcggcaaagtcgctcaccgagtccggcaggctgacccccatgcgcacgttgcgctgcacgcgggccatggcgtccttgagtgggttttcaacgccctcgacgccgcccagtaccgcgtccgccagggttctgccggacttgaggctgcgtacgctatggtcgagcaactgcggcagttgctcgaccatgcgctgcacgcgccgttgataacgccagctgatgtacacgcgcagtaccaggggcggcgccacgaccatcgcgatcagccccagaccgtcggccagcagccagccgaacagcgcgcctatcacccaggcgctcagccacaggcccaggcggtcggtgggcttgcccagcccggcgcgctggaacatgcgctcaaggccgctccacttggtattcggctcctgggtgtcgggctggccttcgccgaggcgctccaacacgcggtctgtctgggctttgcgcaggccatgctgaaactgccagaacgacaggccgatcaacagcaggcagacaagcagcaacaccggtcctgtcatcacgcgctccctagggctgcaacgccgattcgcggcgcagtttgtcgccggccgggttgagggcttcgcgcaggaagccaaagccggtacgccggtccaggcggaacagggtattggtgacgtacacgtcatcacgcacaccgaccacttccaccacttcgctcacgcagcgacgcccatcgggcatgcgcgtcagttggatgatcacgtccagtgcggcgcagatcatctggcgcagggttttttcggcgattacccgcccggtcagacccaccagggtttccaggcgcagcaacgcatcctgggcgttgttggcgtgcacggtgctcatggagccgtcgtggccggtgttcatcgccgtcatcacgtcgagcacttcgacaccacggatctcgccaaggatgatgcggtccgggcgcatccgcagggcgttgcggatcaggtcgctggacttgacttcgccgtggccctcggcgttcggcggacgggtttccaggcgtaccacgtggggatggcccagttgcaattcggcgacgtcttcgatggtcaccaggcgctcgtgggggttgatcagctggctgaggatattcagcaacgtggttttgccggtgccggtaccgccgctgatcaggatattgcagcgcttgcccacggcctcttggaagaactcgaaaatgctctggtcgatggtctgcatggcgaccaggtcactactcttgagcatgtccttgcggaattttcggatcgacaggcacggcccatccagggcaatcggcgggatgatcgcattgactcggctgccatcgggcaggcgtgcatccaccatcggcgaagactcgtccaggcgccggcccagcggtgcgaggatgcgttgcatcacgcgctccacgtggtggtcgtcgatgaagcgcaggtcgctctggtgcagcagcccatcacgctcgatgaatacccgatggggcccgttgaccaggatctcggtcaccgaagggtcacgcaacagcacctccagcgggccgaaaccggtgagttcgtcgacgatctcttcggccaggcgctccgtttcatagcgcgagatcgccaggcgcatgcgcgtgatgtactcggagactttgtcgacgacgaattgcgccagggactggcgcgtgccttcgagcaggttcttgcccgactcctcgatggcgtcgatgatgtagcgatgcagcaccagtttcaggccatcgtgatctgtgttgccaccggcagcgcgggctgggccgccaaacagtttttcgccgctcatcgtccggaccccaggaagcgttcaaaccagcgcatcgagggctttgccaaaccctcggagcgttttgccaggcgctcgcccaaggcacgtacggcctgggtcaagggttcgcgtggcgccagggcgaacagggtctgaccctggtttttcacattcaggcgcaattcggcgctcaggggcagcacggcgacgcattcgaggccgaagctcttttccagggcttcggtgtccggcgcgcaggctttgatatagcggtccaccaccagcttggcgtgatcgagcttcatgcctttctcgcgccagcggttgatcactgccaggttgcggcggcagtccagcacgttctgatcggtacaccacagcagtttgtcgcaatggccgacaaaggtgcgcagggcttcgctgtccggctgaccggtaatgttcacgacgatgtgctggaagtgttggcgcaaggcgctgagcaacatgtacagctcggcggcgctggtgagtttgagcggttcgtcaccggtggcgtacgccaggatgcgcaggccatccagggcggtggtgaacgcgctgttgatcatggtggtgtcgaggcggcgcagatgccgcagcgcatcgccgaaattgaacgtgctctccaggcccagcagcgccaggctgtcgctgcgtggcaggcccaggtcgagcagcagggtctgctgcccgctcttctgcaccaccagcgccaggtgggtggccaacatcgccccatcggcgttgctctgggtgccgaacagtacggtcaggccacccagttgggcgttggatgtcacggtcggcaggcgcttgctcaggcgccgcaccaggccggccacttcgctggagcgtgagccgtaggcgacaaaatcccgagcgccggcacgcatggcattcagcacaagctggttgtccatgccatcgcccagggcgaccacggcgagcatcggcttggcttccagggcgccttcgatcagtgcgctctgggccaccaggttttcgcggtccaggccgatgaacaccaggttggcgaaggtcacgtcggccagtgccagcagttcgtcgaggctgccggtgccggcgctcaccacttggccaagcggtgcaagggctccctgcagccactcaaggtcggtggtgttgcgggtgatggcgaggaaggtctggctcaggctatcgctcattgggaaagtccactgcgacgatcgaagttgccgttttccaggaaaaacagccggtaccagttcgggtcgtagctgcgcagtttttcgcccggcaaggacggcagttgggcgttggcggccaacggttgcaccaggtgcggcgtgacgatcatcagcagttctttttcttcgcggctgatcgtggagtcgcggaagaacgcgccgaggatcgggatatcgcccagccccgggaatttgtcgatggtcgagcggttgttggtgctgatcaggccgctgatcacaaagctttcgccatcggccagggacacgctggtgtcggtgcggcgtacggtcagggccggcacctggatgccttggatctgcaccgcgttgctgtagtcgagctcgctgacttccggcgccaccttgagggtgatgcggttgcggtcgatcaccgtgggtgtcagcgtcaggcggatgccgaactccttgtactcgatagaaatggtgtcgctgccggagctgggcaccgggatgggcacctcaccgccggccaggaaggacgcgctctgcccgctcatggccaccaggcttgggcgtgccagggtgtaggcaaagccgctgcgctccagggcgttgatcatggccttgacccggccaccaccaaaaccgacgttgaagctgtccgtgctcaccggcagtttgaacacgccttccgagggggacaggatgttggggctgccgaggaaaaagtttgcacccgtgcccaacagcttggtgctggcttccttgagcttgctgcgactgacttccacgaagcggatatcggtctgcacctggctgggcagcaacgggtcttgcgagggcgacagcgacacgctggtcagcgccgaggtggccttgcccttgacgaacaccatgctctggcgcggcgcgctggcgcaggcggtccacaccagcaggctggtggcgccgctgctgacaccggtgagcagaaagttacggtcgccgttgacccgcacatcggcgatcttcgggtcaccgatggcaaggcgcgtgattgccacgggtgattgcagttcctgctgcaggccttctcccacctcgaccacggcgggcaactggcccagggcgctgcaattacccggcgctgccagagccatgccgatcggcaggctcgacagcgtcaaggcgcaggccagctgcgtgaacatgggtgcgtagcgatggctcattcaaggcatccttgttcgatcacggggtttgtggcgccgcttgggcgccgcgaatcacttcgatgccacggcgcacgccaggcccaccgccaaccggcgcgacgcgtttgggcgggccggtcaatgccagttgagtgaattggtaaaggtcgcggttggcactttccagcttctgcgcggtgtcatcttcaccggcccagtagcggctgagcagttgctcctcggcactgcgcacggccaggcgcaaggtcccggcttgcgccgcgagcatcaggcggcttaataaaggctccggcacggccagcaccacggtgcgtgcggcgaggcggcgttgtagggcctgggcgcgttcttcggcggtcgctggcggtggcactgccggctggccatcgttggccaggcccaattgatcgccgacgctgagcagacgcatggccggcaggacgatctgggccgactgttcggcgttgccggcatcctggcgcaggaacagcagcacatccacgtaatcgccggggctcaactggcctgcggcgccgaccacctcgtccacggccacggccagcgcgcgctcgttggggcggatcatgcgcgagagggggccaccggcgttgaaactgtcctcgttgagccaggtaccggcgccgagggctctcagggggatacggccgatggcctggtcgagctgggtcaggctgccggcgggcgcggtgcgcagtttctcgacggacaggtcggcggcggtcagtggcgtaaaggcaggcacctcatgccgcaagacaactaccggctggcgggtttggtcttcagcggcggcgagggttttttcaacggaaacgacaggtgcggcaggcgctacgacgggctcgggtgtgcggctcaacacaagtccccagtacccggcaatcaatgccccgatcagcaacaagccggccaggaccatgctgatgcgactgttcatgacggctctccctttcccgttgcactgcacaccctgttaatccaaacgggttaatccgcaacctggctgtgatgaacatctaacgatttggctatttgaaggtagctcagctaggacgaaatgccattaccgctggaaaaaattatctggcgtataaagttggccttttaaattgcagtgttgtggcgtcaactttgcgactaatactttgtgattaatccgttcttacagttgtgaggccgaggtttgttgacaatgctctaatggcacgccgcgatcatctggtggtagagcctttccggctttcagtggcgttttagggagaagtccaatgttccttgacatgatgttgaagctgtatgtccaaacccaacttttctttcaacgcaaagacggcgcgtccgggattgagtacgcgatcattgtggccatggttgcattggtgatcgtcggtgccggttctgggcttggaactaagatcaaatcgatcttcgacagcgtcgccactaagatgaccacttgatagcctgcttatccatgtggaaacgccttattaacgttcttcctgtccaggtacagctatgagcgcctcttcgccttgccgccaacaaattcttttggtggatgacgaagaggacgccttgatcgaactcgccgaatccctcgaaaacgaagggtttgtgtgtttcactgccaattctgtcacgttcgccctgcaagaattgacacttcaccccgacattgccctggtcatcaccgacctgcgcatgcccgaggaaagtggcatttccttgatcaagcgcctgcgcgaacacacctcacgctcccacctgccagtgattgtgatgtcgggtcatgccgaaatggatgatgtgagcgacatgctgcgcctgcaggtgctggacctgtttcgcaagccgatctacctggtgcggttgatcgatacgttgaacaacctttttcctctgcccaaaacggtgtagtgagctggcctggtaaaagcgggagtgctgcgcactccaacgcggggcaagcccgctcaccacattagagctggtagctgaagctcagcgaatagcgcggtcgacgatcgaagctgtccagggcttcgtccgacatcggcttggcggcttccagcgcgatgttgtagtacttggcgtcgccaaagcgcaggcccagcgccgccgatgacaggtcattgcccttgaccggcaggtcgttgaaccaggtcttggcgcggtcgaacaccacatagggttgcaggatcctcacccaatcaccggcgcggttgtagctgtagttgacctcgtatgccacgccccagcctttgtcgcccgtgccttggtcatcggggtagccgcggccgaaactctgcccgccgaaggtggcgcgctcgctgtccggcaggtagtcgttgctccagtagagcgcgccggacagcacgccttgccaattgccgaacagcttgttgctctgcacgccagacaggcgcaggcggaagaagtcgaggtcgggcttgaggccgccgaagtcggtgcgtgtcttggcacccatgccgttgatgccttggtagaggccgccgctgatgatgcgcaactgcgtgggatccgctttgcgccagtcgccctcgaaggccagggcgcgcaggttggtttccagctcgaaacgctgagggaaaccgctgagcttgtaccgggtggtctggtcgacggcgtagaggcgggcgccgaggttcagcgattcgctgggcgaggcgataaaagggtggctgaggccaaaggagtaacggtcgatttcctggtgcggcttgagttccaggccatcgcccagttgcaggctggtgcttgggtcggcgcggtagcgttcgcccgagagcgccagttgggtgccttcggcattgaggaactggctataggtcgcgcggtagtagtgctctttatcctggcccggcggaaacaggccactgatgctcagttgctcgcccatggaggtccacgaattgctggtgccggtcagcagcgcctgggtgccgccacggctggcctggttgaggctcatgctggtggtgacgggcttgcggctggcggtgacttgcatatgagtgccgccatcggtggtgctggggggcggcacttgagcctgcacggtcaggccagggatcgcactcatcagcgtggtgtagcgttcgaaggtcttgcgcgtgagcgggcgttcggcctggagttttcccgccagtttgtcgacataggaggagactgatccgatgtcgccttgcaactggtaatcgcggatgtagccctccaccagcaccacctgtaccaggccgttttcgaagtgctgttccggcaggaaggcgtaggacagcaagtagccgtcttcctggtagcgccgggtgatgctgcgggtggcttcgatcaattgcgccaggttggtttcatggccgatcagcggcgcgaatgcctgggcgacgtccttgagcgggtagacggtgccgccgtcgatctgcagtttgcgaatggtgaccttggtgtccatcatcagcggctgcccggcggtgggcgccggtgttggcacctgggtgggcgtgccggtaggccggtaggcgtcgacgggcagattgggcacgggcaggttgcggatggtgtcgttgctattgaggaaagtgggaagggtatcggcgtgggcgtaagcactgagggtgagcaataacaacggcgtcaaagcgcgcataggacactccatggtcaaaactgcagcagcgtttcgcagattcccgccgggctctgggggcgcggttcgggtgtctccaggggtcgatcattgacccaaaaaaaagacgagagacttagtggggtctctcgtctcaaccaagcgtaggcgctgtaggtgaggccgtctaatcggccaggtgcaattctattttgtgccgctcaggccacccaacagcccgccgagaacaccaccgtttgcattggcgccggcccccgcgcccgccgaggcaccggcacccacattgagaccgccgccgagcaagccgccaccggtgttggtgccgccggtgaccaggccgccgatcgacgccacggtgccacccactgcggtcacggtgccgcccagggcattggtgaccgggttggcgttggtggcgctgatttgcccgcccaggctgctgaccgcgccaccgacattagtgaccaggccattcaccgggccacccaggccggtggcgttgccgacgttttgcgtcaagctttgcacgccgctggtgacggggttcagtgcgccgccgatctggctggtcagccctgcaatgggggcgcctgccgccatgtttggagcgccgctgccgccgaggagggtacccagggaggccacggtggtgccggctttgacaccggtgacgccggtcgcgctgaccacgccattactgctgcctgcatccaggccgccaccggcaccggcaatcacgccaccgatcagttcaggcaaacccaaccggttgatgctgccgcctgtaccgccgccgctgttgccaccgttgttgccttcatttgggtcgacataaccgccagccttgctcaccacggtgccgacgccattgagcacattgcccaccgcacccgtcactgggttgccagtgccacctgcgccggcgacgttatcgcccaggccgtcgacggtatcgccaactttttgcagcaggccgcccacaggcttatcaagaccggtcgcggtgccgactttacccgtggtgttttccaccagggataccaccggtaccagcactctcgcgccgacggtgttggtcaccgagcccagtgggccggtggtgctggcggtgctcagggtgtcgcccagcatggtcacggcattgccgaccttgccgacgacgttgccgactaccggggctgcgccgctgacgaccggcactttacccagcagggtggcgacgttgctaccggtgacggtcacgccatcgcccaggtcggaaaccccattggccacgccggcgacggttttgcccaaggcattgctgtccgtgccaagcgagcccaggccatccgacaggccggtgccgatgctgccgaccgcgttgccggtggcattcaccaggccgcccgcagtggcgccaacgatgggcaggctgccaagggtggtgcccaggctcctgacggtgccgccgaggtcggtcacggtattaccgagggtgtcgaccacggtggcggtgaccaagggggtcgtgctgccgcctgggttggtgccaggatcggtgccggggttggtccctgggtcggtgccgccgcctgtcccgccacctgcacccgcacccgaggaggacccaccgctgtgatgcccgccaccaccgctgctgcagccgccgagtgccagtgctactgccagggccagcgcggtacttgctttccaaaacacgacttgagttttcatgattgagttccttgcacctgtacaaccttggttgtcttcaaacgctcgctacttctggggatagcgatgcgtttgtccgtgtggctatagcagccccggcggtgcgttctctcaatgctctacttggtattaacgatttatatacagcagcggtgtaccggttaagcaactaatgccaagggtataagggaaggatgtatcaagatgtatatatgttataaatcaattggttaaataaaaaaagcggacttcatgaagtccgctattacttagtgtgtatatatacaattaacctgtttgtttcaggcgatcggccgccacttgcctaccatatgttcaatatcgcccgcgcctttcaaccacaacgctccgctggaaccggcggcgctggccaataacgtcacttcaccgggcaggcgcacgggtttcctgaactcgacgtcgatctcgatattggcggcgggcaagtgttcgccgagcgcggcgagggtgtgcgccttgttccacagcccatgggcgatggcctgggggaagccgaacagcttggcggtcagggcgctgaggtggatcgggttgtaatcaccggagactcgcgcataacgacggccgatatcggcgggggctttccagcgggtcagctcgctgacctgggcgggagacggttgggtgatagcttctgtctcgccttccagcttcacgccccggcacagcatgcggctgtcggcttcccacagcaggccgagggaatcctcaaccgtggtgatcagatcgaaggttgcacccttggggtggggtttgaggttctgcgcgtgtacagccacgaaaaggtcgctcacaccccccaaggggcgatgaatgcggatgcggttactcaggtgaatcagccccagcagcgggaagggaaaacgtttatcggtgagcaactgcatctgcaggccgaacgccaggatatgcggatacgtcgccggcaggattgggccgtcggcaaagccgcagaccttgcgataggccgtcacccgctgggcatcgatgctgacccggcagcgcaacccgaactcgggcaatgtactgccggtgattttgcgcttgagggctgcgcgccaatacagcggcggcagagacggtgctgtgtctaacgtcttccattgcatgctcacgctcccaacagactttgcccacacacctgcaacgcttgcccgctgatcgcaccggagcccggttggcccagccaggccaccgcttcggcgacatcctgcggcaggccgccctggcccagcgaactcatgcgtcgcccggcctcgcgcaaggcgaacgggatatgcgcggtcatctgggtttcgataaaccccggcgccacggcattgatactgatgccgcgcgccttgagcagcggcgcccaggcctgtgcgaggccgatcaagccggccttgctcgccgcgtagttggtttgcccacggttgccggcgatgccgctgatcgacgccagcagcaccacgcgggcgttgtcatgcagggtgccgctgtcgagcagcgccttggtcagtacctgcggcgcattgaggttgacggccagcaccgcgtcccagtattccggggtcatgttcgccagggttttgtcacgggtgatacccgcgttgtgcaccaggatatccaggccatcgggcaggtgttcgatcaattgggtggcggcgtcttcggcgcagatatccagcgccacggtgcgtgcacccaggcgtgcggccagggcatcgaggtcggccttggcctggggcacgtcgagcaggatcacctcggcgccgtcgcgggcgagggtttcggcgatggatgcgccaatgccacgggcggcaccggtgaccagcgccttgcgcccggccaggggccgtgtccaatcttcgaccggcgtggcgcaggcctccaggcggatcacctggccggagatataggcgcttttcggcgagaggaagaaacgcagggcgccttccaactggtcttcggcaccgtcgccgacatacagcaattgcagcaccccgccgttgcgcagctctttggccagcgagcggctgaagccttccagggcgcgctgggcactggcagcgaacggatcgccgaggttttccggcgcacggccgaggatcaccaggtgcgcactgttatccaggtttttcagtagcggttggaagaactcgcgcaattgcttgagctgatcggtgtgttgcaagtcgctggcgtcgaacactacggccttgagcttggggccgtggccggggatccacgtcgacgtctctgcgccgtaggtgtagatcgcgtcggtgagcttgttggcgaacgcctgcaccttgctgaccagtgcaccgccgcccagcagcaatgcgccttccaccgggcgcaggcgcccggcttgccagcgttccaggcgtaccggcgacggcaggccaatggcggcgaccagacgatggccgaggcttgagttggcgaagtcgatataacggtcagacatggaacgctctccgaaggctggggttcaaagggttgaccatcccagggtagcagtcgttcgactaggctcagtaatccagcccacaacagacagagggagctttccatgactcaattgcgccgtgtagcgatcattggcggtaatcgcattcctttcgcgcgctccaatggcccttatgccacggcgagcaaccaggcaatgttgaccgcggccctcgaaggcctgatcgaacgctacaacctgcacggcctgcgcctgggcgaagtggctgccggcgcggtgctcaagcattcgcgggatttcaacctgacccgcgaatgtgtgctcggctcacgcctgtccccgcaaaccccggcctatgacattcaacaggcctgcggcaccggcctggaagcggcgttgctggtggccaacaagattgccctgggccagatcgaatgcgggattgccggtggggtcgacaccacctccgacgcgccgatcggcgtgaacgaagggctgcgcaagattctgctgcaagccaaccgcagcaagtccatggcggataaattaaaagtcctgttacaacttcgtccccatcacctcaagccggaactgccgcgcaacggcgaaccgcgtaccggtttgtccatggggcaacattgtgaattgatggcgcagacctggcagattccccgtgccgagcaggaccagttggccctggaaagccatcagaaaatggccgctgcttacgccgagggctggcacaacgatctgctcacgccgttcctgggcctgacccgtgacaacaacctgcgccccgacctgaccctggaaaaactcgccgccctcaagcctgccttcgaacgcagcgcaaagggcacgctcactgccggcaactccacgccgctcactgatggcgcatcgctggtgctcttgggcagtgaagcgtgggccagggagcgcggcttgccgatcctcgcgtacctgcgcgatggcgaagcggcagcggtggacttcgtcaacggtgccgaaggcctgctgatggcgccggtttatgcggtaccgcgcttgctggcgaggaatggtctgacgctgcaggacttcgattactacgagatccacgaagccttcgctgcccaagtgttgtgcacgctcaaggcctgggaagatgcggactactgcaagacgcgcctgggacttgacgcccccttgggctccatcgaccgtagccgcttgaacgttaaaggcagttccctggccgccggtcatccgtttgccgccaccggtgggcgtatcgtcgccaatctggccaagctgctggacgcggcgggccaggggcgtgggctgatttcgatctgcgcggcgggcggtcagggtgttacggcgatcattgagcgctgaaactggcatattggatgcattcttaagtgatcaacggtcggtagcctctcccaccggcgagctgattgccgtataacgagtgccatacgcgtatttggtaataaaggacccacaataaaagctgatgaagactcctaaacgcattgaacccctgatcgaagacggtctggtcgacgaagtgctgcgcccactcatgagtggtaaagaagcagctgtttatgtggtgcgctgcggcaacgaattgcgttgcgccaaggtttacaaggaggcgaacaaacgaagttttcgtcaagcgtccgaataccaggaaggccgtaaggtccgtaacagccggcaggcgcgggccatggccaagggctccaagttcggcaagaaagaaaccgaagatgcctggcagaacgccgaagtagcggcgttgttccgcctggccggtgcgggcgttcgcgtgccccagccgttcgacttcctcgaaggcgtgctgctgatggagctggtggccgacgagtacggcgatgcggcgccgcgtctgaacgacgtggtgctggagccggaccaggcgcgcgaataccacgccttcctgatttcccagatcgtgctgatgctgtgtaccggcctggtgcacggtgacctgtccgagttcaacgtactgctcacgccaaccggcccggtgattatcgacctgccccaggcggtggatgcggcgggcaacaaccacgcgttcagcatgctggagcgggacgtgggcaacatggcttcctatttcgggcgttttgccccggaattgaagaagaccaagtacgccaaggaaatgtgggcgctgtatgaagccggcaccctgcacccggccagcgtcttgaccggcgagttcgacgagccggaagaactggcggacgtcggcggtgtgattcgcgagatcgaagcggcgcggctggatgaagagcgtcgccaggcgattcgcgcggcggacgatgcgccgccgagcaaggtgccggacgaaccgccgccgccgccgtggatgcagtgatttccagataactggaaatcacaatgtgggagggggcttgcccccgattgcagtgggtcagctacagataagccggctgatccaccgctatcgggggcaagccccctcccacattggatttgtgtacattcggtcaggcgcagcagcttccggacgccaactccttgagaatcggacaatccggccggtgatcgccttggcagtgctccaccaggtcctgcaaggtatcgcgcaactgccccagctccaggatcttctggttcaactcatcgatatgctggcgcgccaaggcttttacatcggcgctggcccgttggcggtcctgccacagggtcagcagcttgccgacttcctccaatgaaaaccccaggtcgcgcgagcgtttgataaacgccagggtgtgcaagtcatccgcgccgtacacgcgatagccgctgtcggtacggtgggcggccttgagcaggccgatggattcgtagtaacgaatcatcttggcgctgagcccgctctgacgggcggcttggccgatgttcatgggcgttgatcctccaaatccttgggtttccaagtcttcaacagtaaggcattgctgaccacgctgacactcgacaaggccatcgcggcaccggccaataccgggttgagcaggccgaatgcggccagcggaatgccgatcaggttgtacacaaaggcccagaacaggttctgacggatcttggcgtaggtcttgcggctgatctccagtgcggccggcaccaggcgcgggtcgccgcgcatcagggtgataccggccgcgtgcatggccacgtcggtgccaccacccatggcgatgccgatatcggcggcggccagggccggggcgtcgttgatgccgtcgccgaccatggccaccacgccggtttttttcagctcggcgacagtagcggctttgtcggcgggcagtacctcggcgtgcacatcctctatgcccaaggcctcggcgaccacgcgggcgctgccgcgattatcgccagtgagtaaatgactgctgatgtgctgggccttgagttgctgtaccgcctccagcgcgccgggcttgagcgtatcgccaaaagcgaacagccccagcactcgcggttgggcgccttgcgcgatcagccaggacaaggtgcgaccttcggcctcccaggctttggccgagtcggccaggccccccgcgttcaaaccgttttcttcaagcaggcggcgattgcccagggccaactgctggccattcagcgtgccagcgatgccgcggccggtcagcgattggctggccgtcacatcggctacctccaacccttgctcgctacaggcatccagtacggctttggccaaagggtgttcactgccgcgttgcagcgcgccggcgtgttgcagcaggagcgcttcattgccatccacggctgccagatgagcgatctttggcgcgccggaggtgagggtgccggtcttgtcgaagaccacggcgctcacttcatgggcgcgctccaaggcttcggcgtccttgatcaggatgccgtggcgggcggcaaccccggtgccggccatgatcgcagtcggtgtggccaggcccaaggcacaggggcaggcgatcaccagcacggcgacggcattgatgatcgcggtctccagtgacgcgccgtacaaccaccagcccaccagggtgatcaatgccagtaccagcacggccgggacgaacacctggctgactttgtccaccagcttctggatcggtgccttggcggcctgggcgtcttccaccagacggatgatccgcgccagtacgctttcggcgcctagggccagggtgcgcaccagcaggcggccttcgccgttgatggcgccaccggtgactttgtcaccaggttgtttcggcacgggcaggctttcgccgctgatcaaggcttcgtcggcgtggctttggccttcgaccacttcaccgtccaccgggaagcgctcgccgggttttaccagcaccaggtcattgagtttcaacgcgttgatggcgacatcttcttcacggccgtcgagcactcgaatcgcccgctcggggcgcagggcttccagggcgcggatggcgctggcggtctggcgcttggcgcggctctccaggtatttacccaacagcaccagggcgatcaccaccgccgacgcttcgaagtacaggtgcggcgccatgccagggtgagcggtgagccattcgtaaatactcaggccgtaaccggcgctggtgccgatggcgaccagcaggtccatattgccggcaccggcccgcacggctttccaggcagcgatgtaaaagcgtgcgccgaagatgaattgcaccggcgtggccagggcgaactgcgcccaggccggcagcatccaatgcacgccaaagggctccaccagcatcggcaacaccaacggcagtgccagtaggatcgccagcagcagcgcccaccgctcgcggagcaggcgccgggcctgatcggcatcggtggcggtttcgctttggggcagggtggcggtgtagccggctttgtcgacggcagcgatcagcacgcaggggtccatctggccgagcacttcaacatgggcgcgttcgttggccaggttgacgctgacgctttgcacccccggcaccttgcccagcgcgcgctcgacccggccggcacagctggcgcaggtcatgccactgatgggcaggtcaaaggtggtggatccattcatggggcagtcctccaggagaagttgcccctagcatcaaccttgacctgtggggaaggtcaagcgcgatcgttcccacgctcggcgtgggaatgcatccagtgacgctctgcgtcacgattctttttgctcagtattccaatgcggcgggtttcagatacatcccgtccggcccttgggcaatgcgcaacttgcgcacatcaccgaccttcagcgtgatgttctgcgcaggcggcgccagcaggcccggtaggcaacccggggcctggcccggcaacagcttcaagcgcagggacaggttgcccgccggcaggttgaacgaagtggcctgctcctggaacagccggcccgccaactggtcattcaggtacaggccgatctcgcagttggtcggcacttccaggcgttcccgggaaatgatcagcaccgcatagtcttctgcggcgagggcttggggcgctgcggccgacaggctcatcaggccggcaagggcaaaaaacgaccagcgcatggcgaatgctccgtggtttaaatcgacgatgagtgaagcttggcctttgaagcggccaaataccagcccggcagacatttgcggaacttgaccttgccatcgtggcaaggtcgagactgggtccaacctcatcaaaggagtcatgtcatgcaagtattcagcgttgaaggaatgacctgcggccattgcgttcgagcggtgacccaggcagtgcagggccaggacccggcggccagcgtgaaggtcgacctggcagcaaaggaagtgggcgtcgaaagccgcctgtctgccgagcaagtgatcgaggcgatcgcagaagaaggctatagcgccaagcttgcctgaggcggaaaaatagttagcgagctatcgtgttcaatgcacccaagcgcggctagactatcgggctgccgactcacttgggtgcccgatgaacctccgcataatcctgatcctgggtgccttgagcgccttcgcgccgctggcgatcgatttttacctgccgggcttcccggccatggccaaggccttcgccaccgatgaaaaacacatccagctgaccctggcggtgtacttcggcggcctggccatcggccaattgatctacggcccgctggcggaccgcttcggtcggcgcggcccgctgctcagcggcgtcaccttgttcaccttggcctccttcgcctgcgcctttgcgccgtcactggaatggctgattggcgcgcgtttcgtgcaagccctgggcggctgcgcgggcatggtgatttcccgcgccgtggtcagcgacaaatgcgatgcggtgggctcggccaaagtcttttcccaactgatgctggtcactggcctggcgccgatcctcgcaccgttggccggtggggtgatggtggggctgtggggctggcagtcgattttcctggcgctgtcgatattcagcgtgatggcggccatcgcggtcgccgtcgggctgccggaaacctttccggcccatcagccgcgccagccgttgtccggctcgttgcgtcgctatgcggccttgttgtcggaccgggtctacttgggctacgccctcaccggcggtatctcgattgccgggatgtttgcctacatcgccggttcacctttcgtgtttatccaactttacggcgtgccagccgagcattacggctggctgtttggctccaacgctgcgggatttatcctggtggcccaggtgaatgcgcggctgctgtccaagcgcgggccggcgtttctgctgtcgcgcagtgtgtgggtctacctgctggcggcgttgacgttgctgggcatcgcggcgttgcgcaccgatgcgctgtggccattgctggcgccactgtttatctgcatcgccagcctgggctgcattttgcccaatacctcggcctgcgccatgagcgggcagggcgcacgggccggtagcgcttcggcgttgctcggctgcattcagtttggcgtggccgccggcgccgcttcgttggtcggcgtgttgcacgacggcacggcgatgccgatggccatggtcatcagcttgtgcggtgtattggcggtgacgattgcgatgtcgacccagcgcctgcaacgcaaacgggccttgcaggcgcaggtctgaagagcgggtcagccagcggcagaacgttgctggctgatgggaaaacggtggggcgcctggatacgggcttgcagggtgtcggcaaaggcacgggcctcggcctcggtgcggaaggtgaaggcgtcctggtcgagacgcacctgccatttattgcctgcggattttgctaacgcttttatcaggattttcattgctgacttcctcacgtaaaagaatcgtggcaaaggcggccaatataaacccgaatacgctcacacatatgacaaagatcaactctctgactagcggtgtcgtccattactcacatgaataatggacgacactgacagccttttttcagaacccttccagcacgatcttgcccttggccttgccgctttccagcagcgcatgggcacggcgcaggttggccgcattgatcacgccgaagtgctcgcctaccgtggttttcagggtgccggcgtcgatcagttcagccacgcggttgagcaggttgtgttgctcgatcatgtccggcgtctcgaacatcgaacgggtgtacatgaactcccagtgcaacgacaggctcttgcgcttgagcttgctgacgtccagcgccttgggatcgtcgatcagcgccagcttgccctggggttgcagcgcttccaccagttggtccaggtgatggtcggtctgggtcaggctggcgacgtgggtcacgtgcgggtggccggcggctttcagcgcttcgctcaacggttggctgtggtcgatcaccaggtcggcaccgagggccgtggtccacgcctgggtttcagggcgcgaagcggtgccgatcactttcagggcagtgagctggctggccagttgggtcaggatcgaacccacaccaccggcggcaccgacaatcagcaggctctggccttcatcctgattaccctcacgcacttgcaggcgttcgaacagcagctcccaggcggtgatcgccgtcagcggcagcgcggcggcttcggcaaagcccaggcttttcggcatatggccgacgatgcgctcatccacggtgtgcagttcgctgttgccacccgggcgcaccagggatcccgcgtagaacaccttgtcaccggccttgaacagcgtcacgtcgctgccgacggccttgaccacaccggccacatcccagcccagcaccttggcggcgccgttttccggggcgacgttctggcgcaccttggtgtccaccgggttgaccgagatggctttgacttccaccagcaggtcacgcgggccggcgacgggggctggcaactcgatatcttgcaaggcgtttggatcgttgatcggcagtgaggcgtagtaggcaatggctttcatggaggctccgaaaaaaggatggcgatcaggcaagaaatttcaggcgcttgagttcgaagtgttcgatcacatcagcggccttggcgcgaaagttttggatatgcgcgctctggtcgtggtcggcgagcgccgcgtcgtcgctccagcgttcgagcatgtagaaggtctcgggatgttgcaggtcctggtgcaggtcgtactgttcgcaaccggcttccaggcgcgtgggttccagcaggtcgcgcagcaagggttccagggtggcctgttggccgggtttggcgatcagcgtggcaatgacgttaaaggcagtggacatattcaactccagacacgtgatgaacgggatgcacagatgattggctatttcccgcgcagataaaagcggctaaaacagcaggctgtttcaatgaaattttgataatgagcgggaatgcatgctgcgctttgatgatttgcaattgtttgtacgggcggcggacctggggagcctgtccgccgccgcacgggtgatggatttgtcgcccgccgtggccagcgccgcgctcaagcgtattgagcagcaactgggcacgcgcttgctggcccgctccacccgcagcctgcgcctgaccgccgaaggcgagggcttcctggaatatgcccgcgcagcgctgagttcgctggacgaaggccgccgtttattggccagcggccaggaccatgtcagcggtgtgctgcagctgtcggctccgtcggattttgggcgtaaccagttgctgccgtggctggatgaatttcagcgtgagtacccgcaactcaccgtgcgcctgctgttgggcgatcggattgccgatctgtttcgccagccggtggatattgccctgcgttacggtgagcccgaagattcgagccttatcgcactgcccgttgcgccggataacgtacgggtgctgtgcgcctcccccagctacctcgcacgtcatggtcagcctcggcacctggagcagttggcccagcacaattgcctgctctatatgctcggcagccgggtccatgaccactggacctttcacgacggtaaacgcgaggtcagcctgacggtgaccggcgaccgcttcagtgacgatgccgacgtggtccgccgttgggcggtggcgggtgtggggattgcctacaaatcctggctggatgtcagcaccgatgtgctcgcggggcgcttgcgcctgatcctgccggagctgcgcggtgagcgcacgccgctcaatctactgtgtgcccatcgtgcgcaactgagcaaacccatcaacctgttgcgggaaatgctcgtgtctcgctgtgcgacgttgaccgctcaattgccggagcgattgaacgcgatgtaacgccctccatcacagcaggaaatttcattcaggttctgtccctatccacgctgtcagacgccgtggaaccggtggtttgcgcccctatactttggctcccgcatcagtagaaaaataagccaacagggagtgaaaagatggaagcagcaccttgcatcagtcagatcgccagcttgcttgccgagcctaaacgaaccgccatgctgtgggccttgatggacggttcagccaagtcgccggtagaactggcgacgctcgccgggttgtccgcgacctccgcccatgcgcatttggcgcgactgaccgcaggcggtttgctgcgtgtggaagccaggcgtggcaagcgcctgtttcgcgtggcggcgccggatgtcagtgccgccatcgatgccctggccaggaccaccatggcctgcgcagcgcgcagcgcgccggatgctttgccgccgaccctgcttgctccgccgtcgttacgtcatgcccgtttgtgccatgggcaccttggtggcgagttgggggcgcagttatatcaacatctgctggaagcaggctggatcgagcgctacgaacagcgtaccgatgtcacggtgaagggcgcgaagcgcttggcaaaactggggatttttacccaggcattggcatcgccgctggtgtgcagctgctttgactggagccagcagcagccgcacctgggtggtgcgttggggacggggttgttgcaactgtttttgcagtcgaactggatcagcgtgatcaatgagtcccaggccttgcaggttcatgccatcgggcgacaggaaatcacccgattggccgtgccaccaaggagctgaccgtgtaggagccagcaagccgcctcctactgggttacggttttaccagtcgcgcatccaggctgttttgcgccaggcgtttggcctggtcctgggtcatgcccagtgaggtgtacaacgcgtggaagttctcggtgacataaccgccgaagtacgccgggtcatccgagttcacggtcaccttcacaccacgttcgagcatgtcgaggatgttgtgctgggccatgtcgtcgaacacgcacagcttggtgttggacagcgggcacacggtcagtgggatctgctcgtcgatgatgcgctgcatcaggcgctcgtcttcgatggcgcgtacgccatggtcgatacgctggattttcagcaggtcgatggcttcccagatgtactccggcgggccttcttcaccggcgtgggcgacggtgaggaagccttcgtggcgggcacggtcgaacacacgctggaatttgcttggcgggtgacccatctccgagctgtccaggcccacggcgacgaacgcgtcgcggaacggcagggcctggtcgagggttttttcggcttcggcttcgctcaggtggcgcaggaagctgaggatcaagccgctggtgatgcccagttgctgctcgccatctttcagcgccgcagcgataccgttgagcacgacttcgaagggtatgccacggtcggtgtgggtttgcgggtcgaagaagggttcggtgtggatcacattctgcgctttgcagcgcagcaggtaggcccaggtcaggtcgtagaaatcctgggaagtgcgcagcacgtcggcgcccttgtaatacaggtcgaggaattcctgcaggttgttgaaggcgtaggccttgcgcagggtttcgacgtcgttccacggcagcgcaatcttgttgcgctcggccagggcaaacagcagctccggctccagcgagccttccaggtgcaggtgcagttcagccttgggcagggcgttgagccaatcgtacattttctaaattctcatcaggtgcaatggcggcattctacaggccatggctgaaataatcggcaaaacctgaccagcaggattgttttcgttgcattcgcgcaagggccttgtgaactaaggtgtaacgaaacgttagcggcttggcgcagtctgtaccccatcaatgactgatttgccgtactaaaaggcccggaatgctcacatccctcaagcaagaaaaattcatgctgctggcgctgattgccgccatcgccgcctacccgctggagcactggatgctcaatagcgggcaaatcacggcgctgttggccggcgtggcgctgatcggctttatcgtggtggcgtcgatgcgcgtggcccatcacgccgaacaacttgcggaaaaggtcggtgacccctacggcaccatgatcctcaccctcgccgccgtgctggtggaagtggtgatcctggcgatcatgatgagcaacgagccgtcgcccacgctggtgcgcgacaccatctattcggcggtaattttctagacacactccgctttggtgtcaaagcccttaggctttgacctgctcttgctcttgatggggaagattaagatgtgtatttgattgggagtgctcttgcattgtccttcctgacacacctctatctatggcataccccggaagcccggagattttcctcagcccgtgtttgtgactctgcttgaggtctaaggatgacttgctgtgtggggagcatccttgccgcgagttcatacaagatcagcgacacgcggctatctgtcaggcatttggctgggcggaaagaaatggcgttacgtatgtgacgaactcagcatgaggagtgcgatgctcattccaccttggagggtttgatgccggtcgatagcgtaagtcgcatgtcgtgatcatcaaccgctccttggcgcgtgaaacacccacaaagaagccgcaacgctcctcttggactttgccccaaaatgtctgtgtttctacaccgatcataattacagagtggaattccaatcctttacttttatgaatcgtcagaaaacggactgcttgatcgttggagaacagatcaagtgctttgagcaaatccggttcttgctcgagcagtttctcaatttgctgtctcgtgttcttgataacctcgttcaatctggcatttgcttcgtagtcagaagaaagggtggtcagcacgggtaggccgatgttctttaggaacttcatagttagctcccaccatcctgaataaggcgcgtcagatcgggccaattttttcacttccttgcgctgggcaagatagaggcgctcgaagtttctctggatctcagattcaccgtcctcgtcattaaatgaaaccagttgctccatcaaattgatccacgccttcggttctcgctcccgatacaggcatgataggtagtcaataattaggcgagcggcgggctcattaactagatcttgagactcatgctcgttgcgaaagggaattcctctggctgccagttgctccatgagtagggtgccgtagaggtctatctgcctgggaaaaagaatcgctatttctggtaggggtattttctctacatctatccacttctggatgatgttggccaacgcggctgcttcgctgtgactgttgtcgtagtttcgagcgaggagttcgccgtcgtttccaatgatcaggtcatctgccatcaccgcagcaggatcaagtgttcgaatgatctcgttctgcatccgcaaaagccgaggcttagatcggaagtttcgatatagattgagtggtcgggcgtcgaagtcctttgcgtagtctataaatatgccatccagtgctcccgcccagcccataattttctgtttggtgtcaccgacggcggtcaatcgaattggcttattcatgaagacaagcttcagcagtgcgtactgctcagtagtgcagtcttgaaactcatcaaggaatacatcagcgtaggtctgacaaattgcatttcttgcaaccactgaattgctcaagatcttcgttgcgagaggtatgagctgcgcgaacttaatttgtttgccttgaattggttcgtcgcctatggagtagtttggctcaagagagtccccgcccgtgagcacgggtctaaacctatcaatgatgcgcttggcgaagccgtgaaaggtgtagctgtcgaagcgtgcagccagatcaagtccgcatctgcgacgaatccgttccttgaggtttatgctcgcatcgaccttgaaggagatcgccagtattcgcttggggtatcggcagtttccggtgcgtagcaaaaagtctgcacgctgcgccagaacttccgttttgcctgcgcctgggcctgcggtgagcgcgagcgactttccaagctccctcacagcgagaagggcgtttgtttccaaggtcaagccatcggcgactttccatacatccgcgctgatcattctgggatgtcctccagcgccgcgatgattgcgtcggctaaacgatctagcgatggaggaaggctttttagcagatcttcgtcagtcagcttcgcaagggcggagatgtgtgctgcgggcttgctacctaatttgaattttgagtgataggttccaaacagttcctgctcatttgcatcatattgaccggcgttacagtgactctttccgagcactgccttaagagttgattcgtcaggagggcttcgggaaacaccgtacgcttttgggtaggctagaagcatggagaaatctagatccataggatccgaaaaataaacgccccgtttttcaagttcggaaaaaatgcttattgttccttcctcaaaccagtggtcggttcgaactggaagatcttcgttccacttagctatttcccagttaggtagttttttatctggagaaaactttgccaactgattattgacgttgctaatccgcccccacccaccttgatgtcgtgcgacatcgagatccaagagggtcacaaaaggcgtttctaatgcagccagcaagcgccagaaatgattgacgtggcgtccccccagtggagcgattgtcaccgctgactcatcaacaggtgcgcctttcgcttgaagtattcttggaaggacaatttcctcactgtcaccttcgcctagtacaaccagcctagagaaataaacttcaggaaaagcctgcacagcctctcggacaaacttatgagcctcatcctctttgtcgggtagtgctatgcaggtgaccttagttgcacggctcgcagccaagcgtagatagcggatgttctcgggatccacgcggcggagcatggacggggcatgggtcgcaatgattgcctgagagtcagcccctccaattgagctattgagggcgttcacgatgcgcccgaggtaatgaggagagaggctgttttctggctcctccactgcgatcagtgtgaatgacggtggcttcagtttgtcagcgtcgaaagaaacgtccttaccggttaggactgcacgcccgatggcgtgagaggacaacaccagtgataggtaaagcatcgacttctgtccatcgctgaggcgagagaagtcgactagattctcgtcgtgccctggggagaacgacactgacatgtgtcttagaagcgactcaatttcggatgtgacgaaagtgagcttgggatcggtgaaaaaggtgcctctgtgaagtcgcttccacatcccattcaggctttcactgaatgcacttaccgactggtttcctgataaacattcgctgatttcgtcagtgagtcctttaatccttgcgcggtcatcttcccaattgacggctcgtagcaagcgtccgagcagggcgttagctccataggttatgtggtcggcagggtctcgtctggcggggaggtaatgcatttgaatggtattgcgatgcgcccgagtgacgactgcggtcgatagtgggttggcgtttctatcaacatcaaggacataaactaggttctcttcaatgtctccatcaatcccgatggtcgcgctcaatcgatatctaacacgcgggatgccgtcggctgtatccaatcgcatatgagcgaaatgcggggccacggtcgagttgtcttcatcctccagaagctctgggaattcgaaatccgcttccagccataggctgcgctcctcaggtaccaaatcctcatcagcaggcacatggaagtcagatcgcttgatccgacgcaggcttggatcaaaggcaaacaacctgcagagcgcttgcaggactgctgtctttccagagccattggggccgataaggtaggtgacatcctcgaatgtgattaccgtaggttcattgccgaaggattgaaaattacatagccgaatactgtgcagcttcattgctcaccgcccatcgtccaggatgtgtacgtaccgcgtctgctgactcggttcgcgtcgccgacagccgaacgggtcggatatcgctgacttagaataggcggtttgatttaaaagatgttagtaggccagcattcagtaaagattatttggtgcggtcttgaaggctctgttgcagatcgcctagctattgatgaacggcatggcgtgcccattgtctagaaaggtgctctccgtaatccggtgacgacagggtaatcctgagcctacggagggagcgtatgcggggcattagcatcggtatgcattaggtaggtgggggaacagaataaatcaacgcaaggagccttagatggccggcagtagcttgttcgcactattggatgacattgccacactgctagacgacatctcactcatgagtaaagtcgctgcaaagaaatcagctagtgtcctgagcgacgaccttgctgtgaatgctgagcaggttaccggcatgaaagccgaccgagagctaccggtggtatgggctgtattcaagggctcgttgagaaacaaagccatccttgtgccttgtgctttggtgttgaacgcacttttgcctgcggcggttcactggctgctcatgattgggggggcatatctctgttatgagggctttgaggctatcaaggacaagctcacggctggtcgagacgatgacacagggcagccaaagaaaacgaagcctaagacgcctgaagagcttgcagcttatgaaaagcggaagattgcaggggctgttcgaacggacttcattctgagcgccgagatcatcgtcatcacactaaatatcgttactgatgccccgatgctccaacagattttgacgttagcgctgatcgcggtagtcatgacagtgggcgtttacggattggtcgcggggatcgtccgcttggatgatgctggccttattctccagaagtctaaagctaccggtacatggggttctgtggtgcggactgtcgggcgatggctgctgtcggctgctccgaagcttatgaaagcattatcctggatcggaactgtggcaatgttcctggtcgggggggcgttcattacagaaggcatcgggccgatgcagcactttgctgagagactggtcgaaggggcaggggcgtgggaaaccttcgcaactttaggcattcactgcctggtaggcgcgcttgtaggcatggttgccgtacttgtggtcaaaagcatcacatccatcactggaagtaaggcttaaagctagctctcatcgacgatgttgaatctggaatcgcatacaatcttacttcgtaaggaatcgctgggttcagcgccgttgatcccataacagcgtttggcataaggtgagtcgaactggcgttttaagcctgaaaagtagggcagtgggccgagagaggagcattggctaatgctaatgtcctgcttctctagccctcatatcatccgttatgaccttgatcatcttgaaatactctgctctaccttggattgcttctggagtagattcaatttctagatttgccatatggacagcaggatctatgacgtaatggctcgcctgcatatagttcttgatggctgggataatccagcatgcgggatagaaacggagaattccattaccagccttctgaatcataccgacccaggcaacctggttggatttaggcattaggttagaaaccatcccaccactcattccattcatttctgagtgtgtgatctgactaagaaaacgcaggatgggggctgatccttcgaactcacaaacaccgtgaaagatatgcttattgatcactgtcgagcagttgtagtcatcgccatacggatactcaatcgggttttcatctattgggtagccagaggctaccaataacatgccgtcatacaaatcgcttacagctacggctatacggccattcgtgccatctaggtcgatgaatttatcgggaaaacggaatagcgaggatgaaagctcgatcagcacgatgtcttgcatgtcgatacagggactatctgccgttatcagctcaccgatacgccagccgcgcattgggaatcccataccctctattccttcccagcctctcttagcaaagaggtgagtgaagaacggcgactcattttgtgccgcctcgtagttcgcatctagaacgtgttgagccgtcaggagaaaaaatttctgctggtacttgatcagtattcctgtcccgcctttgctatagaccatatcggcgtgataccggccaagctcttcaataggctgagagcaatgggtgaatataagccttctcacagactgaattacgttgctctgagacgtattctcgtagaaccgatttagctttcgtactggaattttaatgttttaacttcctgtatcgcagggtagaaatttgttgcggttacggagcttgaagcttcgtctgcatgtcagcgacatcgccctattttctagccaaaccgctcctgagtatcacagccaaaacaactgccagccaacggttagccaactttccaaggtagatccaccggcaggtcaatttgcaagctgctagccgctacgtccagatctgcggtggtctccgcaaccatctgaacctgaaactcggcatctgcatatcgctccataagtggcgcacgcatcagtaatactcgaacgcgagccttgaggcgctgcccctctggatgcccacaagcgatcaacctgcctatgcgtcccatcactcgacgcgcctccttttcatcatcagcggacagctgacctgaattaccttcgaagcgatcctctagctgtttcacggcggcgcggattgccatccgatgttttttgggaagcgccggtatcggcccgttcaccactaatccggtcacggtgacggcgtcagctttatcgctagtgatcaatgcttgcccgcgcttacgaacatgcagcttgctccgcttctgcaggcagcctttttgtccgagcatccatgtgacagaggcaataacttgggtggtggtagcttgatcaatacgagttttgctagatacagtaatgtcatctgcgaagcgcgaatacgccagtccctgagctttaaagcgagtgacgagcgccggctcgatatcccaaaacactaggttggccaagtaactacttgtactcgccccttgtggaacctggccctcacgagtaactagatccgcaagcagagtggctacatctgcggagaagcggaagagacccacgaacaagcgatgaatgtgctcgtttgtaattgaggggaagaaatcagcgatgtcctgaagaatgactgtcttggcgccggtatgaacccgagcgttcgagtaaatgctgcggggtagcttgggatctctgataccgccgtgcaggtatccagggaacgcaaccttgctgaggatccgatccacgatcttgcgctggatagtcttcagaggctcatgagcatcataggtatgtctgggtgttatgccgtctttttttgtttgcgggacatatcgataaaggcgagagctgcgatgagcaagtgcgattagcctctcgactggctctccgagagcacgtgctaaggcgctgatgctgtggatagggctatgaggatagaacggagcatccatgtccaagcttccggtgatgggccggccccgaagaaccggcccctctgaattcgaatgatgtggtttgttgtgtcatgggaggttctcaataaatggaatcaccactgtctcgacaaaatcccagccctcaacagccttctcccataaccagatgcatagacgaatacgtgcgatccacttgagcagggttactgccttcgcctttacccacgcaatccgacccgctttaggttcttgagatggagctgtctcgatgacacgagcatcttcactgttgtgcatagactgacgcgccttgcggcgcgctaggttctttaaattaaccatgactgatgttcccaacgacaggcgaaattgccccgccgccaagcattccgggccgaaaggaacgctgaagatgccactacaaaccacagttctgcttatcaagtcccttgataagccgtccgccgcattaccgccacatcacatttcgcctcaacgcatcaaacgatcagagacaaacccttggatcacctttgggattgccctaggcgctaagcactcaggagcgatgggcagcaccaacctgcacggcgaagaaagccaaggcgaacaccaaggcgaccagtttcccggtcaaaaaccgcgagcccaaatttcagtcatatttaaagagcacttgggtggtagcacccaacagacgcagtatttatcagaataaacaaaccggcgacaactgttatttgttgcaagagttgtttttcgtataagtcgtatttttgactatataaagcgtcaaaatttaagtgtcactcgtattagtgccacctaggaaatttatcatctttcaagttgtcgagttgggctcgttgacctattatcccactaggcggtgatggtcgcctggcgcctgtttcgcgaagcaatagcccatctgtgacaccatccagcattacatcggcatgtccctaaccagacgctgcccggtgaacaggcaatcggtcacctaagcgtcgtagatttaggagctattgccatgtctgatttttccccgctaaacatcttcaaatctcaagctaaacagcttgctcgtgatcagggcctgaagctttctgtcgctcaagaaacccttgtgcaaaaagcaggcttcgctgattaccatgagttttcagtagtcgcccagcggaaccccagagatccgcgtctgatggtggctgtgtttgggatcaaagactttccccaagcgatccatgaggacgatgtctacgcagatctggagcaggaacttgaggagcagctctctgatgcgattgcagagaccaacgcaagcggattcaccatagacgccttgacgatcaataccgctgactacaccgattcaaccgggatgctgagcttgggagtctcgctgacctaccagggccagcaagaccaggaacgggtgtatcacggtgcagcgttctttcttactgccacggtcgagttgctgcgccgtgatagtaagtggcagcttgctgaggacggcgtgtccatcgcggacggtgagtctgatgctgaccgcgaccgtaggtctgagcaggagtattgggcaacggtggaagaagcccgaagtagcaaccgcatgtccatggcccaagcccttgcgattgaactggggataactgtcgacaacgccgagcttttggccggatcagagatcacaaccaacgaatctgacgacgggctcgtatacagttactggatcaatttcgaaccagaagctgaaggtgaactgagagcagacctgcttgcacgattcggttctctagagtacgagctacacgcaaatttcttcgatgatattgagcacgacttctgaggtgatcaggtgatggccagtttcaatgctggccattcaaaaagctttgcgacatatccaggctccacacgcgaggctacctcaaggcgttacaggttcattacagttcatcatgaaggctctagcgaaacggtactactgccgccggacgcagctctcacagcactgatcccttttccttctttccttctcagctttggcgatgatcttcgtagcctttgctgcggctttgtccaaagatggtagtttttcgatagcttccaagtaacctgggtcgcgctttctagccggatgagtatctggagtacctataaagtcgtgtctagcagctttataacgcttttgcatccaaacatatttttcaagaacaccagaatcagtattttttaacccagcctttatcaatccagacaaggttttcaaatattctgggtatgcgttgctgtccgcccctaccgtttcaaccacacttcgccatgaaaaataatcgaaaaaccaagaaactttaccatcgctatccttatcccgctttagaaatttctttattacttttagcacttcaaccttgggcttcttcaaggctgcgttaaatatttcaggatcaagaataacgcgaggggccttcgcaaccttcgactccaagaaataggctctattcatggctggccctacgacaactttgtcagtgtgcaggagctgaccataggtcaagccaccacgtattagatagcctcgatctgcgagaattaccactatcaaactgagtttatttacgatctcaaatagagcatcaggactatcgagcctgtatgaaattaccaggcagtctgaaaactgagttgcttgaaagtcaggagcatttccgatattagctgtttccgccgcatcactaagggcatcaaccaaatcatttaatgtttcaatgtctttttctgtggacttaaccttctcactaaatcccaagaagtcgagaaacaatgtcagccgtttttcatattcaaccgcgttacccatactctctcccccgaggaaaagttcgaaccatgtccatttttttggactcgcagtacactacgtggggcatccagatgtgtttttcaaccctgcggggtttctaaatagggcttctcggagggccatcctctatttgcaaaacaacctaaagcttgtccattttcgtcgggaagctctgctcatgagctccctctgcatcccccgaggccgaatcgaccggcatgagctagtttgtgattccccgcaccaccagccactcacggcgtcaagcacacccatgagctttagtctggtgatcggtggtgcagcggcaaaaggtcgccgtgatctccctctgtttgaagcccagcactagcacttcgtccttgctgtaccggaaaccctacctaaagatgcgctggacaccctcctgggcagccaaggtagaaactggcgcggccatgccttagaaagctggtggagagggagccacatagtaagcatggcataatgacactctcatacctcattaacagggagaagtttgtggacaaggatctatttaggcatatgtttgaaacccaaattaagaaagaatttggcgacaatgcctcattcgccacacgagaatatgttcatgatcgaaaatacaggaaacatcgtgtaagtgggagaataataggccacgggccggaaggcgtaagccagctgtacgaaatcgtacatactttgattacagatgaggagcggggtaggatttttcctggcgcatttgacttagggaacttccaagatattcctgcagagcgctgcaaatatgtagcgcttgaaagtgagatatataacgagaccaaaatcgaccccgaggaagttttaaaaaccataaaaaaacgcattgctgatttgctagataagaaatttagtaacttcttttcaaaaaacccatcgaaatcacttaaagtccttaagactctttatagattccagagagactatagattcttatttactctattggcgcccccccataaaaccggtaagccatcgtttgaaatacgagactcctatggaattgatgggtcgaacgaagaagtagaaatcatttcggatttgaagactcatctgagttttgagataccgcgcgagcgtctccgtgcgattacatctgcctacggccagatgcgaggtgtactggatgcaattgaggaaatgcttatccagcaagctgcttcccagtgcggcaacaacctcaaaaagttcgagctgatcgtacaatacatgtcggactgtattgagagcatcctcaaaattgaagatcgagagcctgtagaattaccgctggatgaacttctatttacttacttgattcagctcgagttctcacatcacgtagcagccagttcccacctctttgatgcggtcattgctaaccaaccgccttttgttgagtcatggagcactattggtcagctgatgagtaaccttggctttcaaggcatctctgcgcagcactttatacgcagtacggatgatctcatcaaggacttcacttcgggggcgtcatcattcatcaatttttatagcactatctttgatcgagagatcgatagtgctacctacagtaaagctctaccgctcttcgaaaaactattgaaagtgcacagttatagcgaagcttataaaaacattcgatttactatagctattggggcaatggcgcttgtgctaaccgagcttcatgaaagcactccatataaaccttattggtatggtcaaggtaacatcaccggtgggctagttgaatttctcaaaagcgttcgattcgagcacattaatctcgattcgccggaaggatcaacgcggtactggactgggcgcctggattacttcacttacgccatggtgggtcaggaaacaatcttcaaggcacgattgatcttcaataagactatcaacgagagcatcattcgtatccttgagaccctggatcttgatctattggatgaaaagctctcgcttttcgtgtcaactaacggaggcacagcgctgtagtgagcagaacccgcctgagttgcctcaggcgggttgctggttaaggattgtgacggtcgtagtagtcgagtagctcgaggcccgcacggagcactcgagacacatcgaccaccagacgccaaacagatcgaatgaagtctttcattctattcaccgttttcgcggcgctcaccctgcacaaccgtcgttgccatgtacaggatcgctgtcatccaaggacgacgcgtcgaacgcagtggccttcaggccgacgccggaattccttccggggcttccccaaacccacggggaaggcgaacggtgtgggccactcaaaatcctaccgtccaagcggtgaaccgcagatgcacatccctgtgcaattggacggtgaaatgtttcccccacagctttcaccggacaggccatgcgagatggcgtctgtctggatgcgattctgtagattcaccgcgaaggcctgtaggggactaaaataaatacatataaatcaattagttaacagaataagatgtccagtatgacgctagctgaaatccacttctgacggcactccaagaccatacacgcaggcgcctggggcacgcaacaaaactacggcccagtgtctggagatgatcaattcacagcgatagggcggcgggtgaacgcgatgccatccatctcttccgggagcgtcggaagctgccctttcatccatttagcgtagatgctggcgagcgttccatcggccttcttgcgttgcacgaatgcgttcaaccggtcgagcatggccgcgccttccttccgtacccgcgcaggacagcgcttacgactaccgggaatagatcttcaaggcagcccctcaacccgaccctgatgacgtcttaatgcgattccaaggcggtatcttcgtcaagccatgatcatgtggcccgcctgaaagactgggcatctcaggctacagcttgaccggcttcagggtaaattacacactcgtggcccccccccttgggctgtgatggaaaacatgcttcgactggttggcagctctctcgatatcacatcagccattaacgacttcaggctgtcctaccaccaggacttcgcaaatgtgcaggtggttgcccgtcgatatctcaatgcgcagctgggcagcgcaaatgcagtcctacttgcccaggcgctatatacagctttgcgcaactggggggcttgcaaacgcagaagcccaactcttcgtcccgtcccgcaaatcgaaagtgctctaaagggcaagcggcttcatgaccgcctactcaaactgagccagcatagccttgcggcattcagcctcaatcagcaggagcatcgtcttctggacagcaatgcgccaataaacgatgttggagccttcgacaaggaaattctagggatcctgaataggttggcggatgtgctgtttttcaacaacaccggcatcacttaccccatgaaggccctgctactcatcaccgggttgatgccggcactggatagccaggtaagaggcgggctaactcgagcggggaaagcgggcttcaccggacaacaactcctgccgaggaatgtacagcaaggcgcaggccgtcgaatctgcgagcttccgttttatctggggcactgctggagcctacaccgggaagtgttcgtgaaggggattctggagagcaaccacaaggggctgcaagacacaccaggccgggttttcgacatcctgctgttcatgcagaaccaagctacccggaaccaaatcctcgcctttaaggtggagcgggaatggccgtaacagccattctctcccctaccccaattaagactggagagtggggcagtcgttgtaacccttgtcatcaacgccgaagaatgtcatgcggtcagcctcattgagtggcgcatcagcaatgttcatgaccaccggcaccctagctcggcaattaaaggatgctcagcacgttgtggtcttcactggtgccggcgcatcagcggagagcggaattccaaccttcagagacgcactgacgggactacgggagcgcttcgatcctgcccaactagccacccgcgaagctttcacaaacgacccgagtctctgttggcgatggtacgagtggcgacggagcaaggttaatcaggcgcgtccaaatggtgcgcatgtggcaattgccgagctcgccaggcatgtgccaaagctgaccgtggtgacacagaatgttgatgaccttcatgagcgcgcaggcagccaagatgtgattcatttgcacggaagtctgcactctcctcgctgtatcgactgtgggctcgcatatcaattgtctacaagccctcaagcgctgcctgaggaaggaagtgaatcgagccacctcagtgctgtgcctgagacgggtatgttcgtcctggagtggtttggttcggtgaaatgctactcgaggggcatggcaggcagggctggaagctgcaggtgagtgcgaagccttttcaacgattggtgcgtctgggattgtttacccgggtgctgagctcctcatacgcgctttgggccacggggtaactgtcgttcacatcaatcctatgcgcttcgatatcagcagccacgagcactttctctaaagccctgcttcagtaatgaagcagaggcctacgtcgcgagacctttgacagacctactcgtgatttctaaggctgtaagagggccagctcacatcattagcctgggtcaaaatcgcacccgcgccggcagctgccagaaactgagctgctcagcctctctacaaagatgctgagcagctagtgtaacgctatctattgatggtcagattatatgtttagggtcgaaggttcggttgcctgggatcaataatttacggtcactggcgattggtggcgcggtttcgatttcgagtgcccatttggggattgcgagctcttctgaaattcgctctcgaatacgattgatatagaaagttcgtgtatgaagtaaatgtgtccacagaccgtccccttgtggttcgggtatatcctccattagttcaataccatcaagtgtaacggaatttagttcgctgatttcctcaccatcttctccttcggcgcgctcgacaggggtcgatattataactacatgtttacgcgcagtttcgccaggcaaaaatttcagcctgccgacatgcggttctagctttgatagaatgaagacgactacatcagaatactcttgcttcgtcaccaatgataatggtttctccgcataaccaaacttcagcgtctcgcggaattggccgtgcgcatcaaaatatatctcgaacagcatccccgccagcatgtgctttgcggtttcctcaggaaaatgagcaagcctagactcaaggtttcccatgaattccatggccttctgagagttgccacatgctgcttgataaatgtttctccctaatacaaaccatgatgaaggtggaaactcctcgtcgcgaatggaagagattttcagcatggccggattttgggtgtaccagttatgagattttaattcatctattatctcatttatagttgatggtgcatcaacctgatacaaagcgtctgcgagggcttcttggctgtattgaagtcgtagttctacttcttccattgctggtgcctcaacggcaacgatctcattccctgcatcagcctcaggaatatgaacttcctcctcaggagccgcagttgcgtcattctctacctcagcgattacggtggtatctactagcaactcctgcgtattcacctggattgcagccgccagttgagagaactcagtaccgttgcttcgtgatagaccctcgattagtgtggctaaggtgcagatggtgatatcaggatgtcctgtttttcgcttaaattcggagaccagccgaggatcgattattttaatttccggagctgagttccctactgactttcttacatctctgacaatctgatatctcatcttaggcgcatagacccagtcagatttctcatcgttggttacaaagagcactttggggaactgagccgaagcagcattagatttttcgagtatctcgtaccaaatgatgaggtcaccataagggttttcgtctttgttaccatccttaaagcctgggggcattcggtgttcgaagcgggcagccccctcatgagcggctctggtgcaaagtgaggagaggtcagaatcaaggatgcaagtggataagtggtcttgtatttgctggtggatagttccagcgtcgaattggtgtttaaatacacctagatgtttttctagctcttcgatagctgctcgaaatccatttatataagctaagcgatccccctggaatgacgttctatgtaaaatattgtcatctacaaacagtgcggctgtttgatgaaggttttctaaggcttttttaatttgggtaggttctttacttttgggagtgtacgactcaaggttttttccggtaactcgcgaaagatattcacttgccgcccaggcaggtatcgcgagacgctcattcaaaacggcagcatctgaccaagcaaaaaactcttgccgggctgcttcatgtagtttgtaaaggtaagctaatatgttagtgtcgaggataattaatgtctgcgcagaaagagcgagatccgcaatctcacgaatatgctcatccattgtcttgtcaatttggtgataaccgaacacaggtcatgctccttgaaaactttatagaaaaatttctatatgggccaatcagctgaatcagagctcctcatcttcaccgcgaatccagtggtgatcaggaacgatcattgttccgataaggccatccgtttgctttctcaggatttcctcgtgctgagaaattgccagtgcgagcatctggattgcagatctcgcgacccgaagggcacgcaaggccccatcgataaaatctgagcggttgagatgctcgatttcaggagcctgcctcgcttgcgagggatccccaaggtcatgaagcactacgaatcggtgcgtacccgaattccgcagatccttctgtgagcggagaattccatctatgccgtcatagtcttctgccagctcggccaggccgtacattgcgtatacgcctgcacgaatcagtacctctactttttttgtgagcggagtacctgttttcttgtctgcggaatctctccacaacctcccgaaactgactttgttgggagctaatcccagcttgaaatagtagtttgccgttacggctaccttgtcgagcaggtcaagggctgttcgatgcgccagtatgagtgccgaggtatcagggccgtacattgcatagtcgagagtgtctgcaaactgtcctgtcttcggccagacgctttcatcacttgcacgccatgtcaaatcccgtgctaggacaaaatcgctcttcagcatattgaacatggcaaacaatggcggcggtctgctgcccacttctggttcactctcgagaatacctggaagggtaagccaatcgagcttacccaaggatgcttccacgagttcgacagcaggagcaagtgtaagacgttcctcttctacccacctgatgaatggattcgtgtgctcaggccgagatggcggatcgcttagctcactggcgagtgcttcaaccttggccgctgcgcttgcccccgcgtactggacaattcgctccttatttctaagtgcctgcctggctagcatcacggcttccatgcgcgttagctctgagcagcccccacgcttaaaaagccacatgagatccgatgccgcgcagaacgcagctacaccgttctttggatcaaccttcagagcggcaagccgtgcgtcatgagcttcagaaagccggtaggtttttgcgaacaaattagcgatattcgtccaggcctgagtgcgtaattccacatcggcacctacgtcttgcaaaaccctccaatagcatcgtcgagcttcggctctgtaggcgcgggtttgctcctggtgatctacccattcagactcatcggccccacaatttgcggcttccacgagcccgtttgctaggttgtaggtgatattagccgtcggatataggccatgaagctcgcgatatagctcaagaccctcctcaatggcatcctggcgtccaagtgaggcgccggcattaaccagagtggctgcacgcagggccatcagattaatgcgatttggcccatctagatcgatttcacgagcttgttgtactgcaagtgtgggtgcagcatccaccaaggcattgaggtgtgaggagagctttgagaatacgctcaacatgtctggtacctcctttcaaagtgaacgattcagcgatgcaggcatgtctcactcatccgcaaatgcttccagggcggcgagcagcttggctagttcagtaaggttggccgcagtgacgatgtcatattctcctcgactactcagccgatatacttctcgagcctttttgacccgttccagtagaggaacaacaatgcctgatgctctttcaagaaattcgttaatgtctgcccgtgtttgagggatcttgtagcctttggccgcacttgtgatgatgacgtccgcatcccgaagcttggcaatgccactggatcggattctctggccgttaacctctcccaatccgctgtcttttagatgggccatgatctccgtagtcagcacgtaatccttggtgacgaattcgctttgaaatcttaagaaccgcagaatactcaattgcaggcgctcatcctcatcaggatgctcaccaacccgctcgctgaaacggtctgcctggcggagagcttcctggtgtacctggtagtctgcatacccagactcatttgtcggcggcggcagaagagactggtacttggatggccattcaagcattccaagagtcaggctgcggaggattttcttataggcaagaactgctgcttccgaagctttctcttcgtatatctgagcgactgagccagcgaagaaatctgcaacctgaaccaaaacgttgtccttactggccatcgtctggaaggcatccttatcgccaaataggtcgttcacgaatcgttctgcaacgtagcttttgaggctctcctgaaattcctggccaccatgctcgtctacgatcatctggaggtcagggtatgcacggaacaaacgttcatagagcaacccgttcacgtattttatgaacgaggtcttgatacggaggccgccgtctttgtgaattcgggacttatcaacgacggtgaaatagagcttgaatggcagcacagctagctcgttgaggattcgggcacggcgatctgaatctttgggcttcagattgctagatttgatctcgcctgtttgaaaatgacgcgtgcggagtgcttcagcttgggcataagcagcttccagatctttctctgccaccagaatggagcacacgatgaagaagcccgagcttcctccctttgaagtatcaaggtcggaattcccggactcatccacgaaggcataggttctgtccatgagcttgctccatcaacaacgtgctgagcgcagtgggtcgcccaatggcaaggtggcgaactcagttcgtcgcagtggtagtgcctggagcggggccttcgctgaacgtgtagttgatgacaacgtcattgcggatcaagacgtcgagcgttttctgagtgcccgtagtcgtcaccttcatagtgaccacgtagctttgagcatgggctgagccgttggtgtaggtgtagatccacttctcgtcagtctcgctgacggcgctcttggcgtagggctcgccgaatagcgactttagttctgcagtggtagttttacccttggtgatgctcgctacactggccgaaggaaagtctcggcctgccgtgtagtgcgaagtagcgcaaccgccaagtaccacgcacattcccagaatcgcgatgagctttttcatatccgtccttgatcgtagaaggttccaatttagctggcatcgaggctaaaagccatcaccaccttgatcacctgcgctcgcgcttgtcggcagctcatagcacactatcctgcgctggaactgcagcattgttcgccctcgagatcctctcggcataaggtgccttaatcggcacattaagcccttaatcaaggattaatgtgccattttgggatcactacgccagcattcattcggtgggaagcgcaaggcttgtgatgaagctaatcgccactaaaacgcacataccaaccaacagcgggattgaaccaaatttctctagagcaagtgctgctacagggcctgcagcctgggcgatcagcgtgggacgagccagcagccccatgcgtgttccgtagccatcagcgccgaatagagccaagggtaatgttccgcgagcaatggtcagaattccattacctgctccgtaaagcgccagggctacgaaggctagccacgggatggccggtaaaagtagggcaatacccacccctcacagcaggatggcgatacgagccgaccaggtagggtgcgggtttctttagccacgtcgactatccattcgcctagcatttttccctgataacgacggttttgttgggtgaagaaaacgaccatatagccttccatttctatctcctcagcgagtaccaatcatttggtaggacagaagcccggcagcggtcatcgctagcgaacctacgacgtgcaacgaaattgagccgagcgcccagagcagtctgccttcctgaatcaaggcaaccgtttcggctgaaaatgtagagaaggtggtaagtccaccacagaaacccgtgatgagtaggagacgccactctggacttagtgtcggagatgcggcaaagaaggcgatggccaagccgatgatgtaacccccaaccatgttcgcgaccacagtgcctggaggaatcgtaggaaacagagcattcagcttcatccccaaaagccaacgcaaccaggctccaagtgaagcgccaacggcaatgacaattaatgacttcagcacggagagtcctcctcatcagatctgagtggactaactggcaagcagctcgcgctgaaagaaaatggaaactcgaagggtaagatcatagcctgtcctaaaatggaggacagggagacgcacctacgcaccctgtccagggtcacgtaggcatcatcagcacgaaggcggtttaaggaggaatgccatctcctgtcctgatcctatagcatcagcgccaatggcatcaagagcagccgcatgcaagcgatccgaaggcccttttggctaagtaagatgtttgatcaatgatccaggtacaggccgaccctttgcacaactaggtcatttggcgcgtttacatggatttaaccgataccacttctacgtacttgtacttcttcctagcagccttcacagcctcctgctcagcaagcaaagagctcaacgtatctgcctcgtgaaccaactcgatcattttcccttcaaactcgtttccaacgcgaagcgtgacccgcagcctgggagtaaaagcttttgccgttttcttcttagctgctggagcgaccaccgatttcgcgagcacaacttcttccactggctcctctactgcaggagcagacatctgctcctcgggctgaggcgtaccgaataacgcacgacgcatttcttcttcagttaattcagagttcatagaacatctcaaagggggcggtaatcagctcgacgaattctactaggatggctgctccagcgtgtccactggaagcatgtatgaatcacccgttgctcgacctacattcctagatcgacctcgagcctggcccccttcaagctgggctgcagcttttcgacaggcatggcccgcaacaacttgtcgacaagatgctcggcgtgagcggagtagatcgcgattctgtccggctctggcggcctgtaaggtactaccgcaccgacagatacttgggcaattctcagtatattcagcacgtcattgccaatgtgaagactttccaggtactcgacggttgcgcgggctcgcggctctgcctttgtccatagttcgacaacaatgcggtgaaatcctatggggccaaggtgttgcagagcactcttccacagcaaaccttcttgggacattttcagcctggtgctggtcattcaaaagtcacggctgttcgggcttggttgttttcaaatacctacgaacagtcgcttcagaaagccccaacctttccgcgatctcagcaacagaaattccccactgcttcaatcgattggcctcaatggcatttctagccgcatcaggacgagctggccgcccaggacgtggctttccagttcgagcctgcgactcaatctcaaggtcgatccctgccttcctaattcttgcgagttgcttcgtaagacgtttctggccgtccttgaatgactcgtgattttgcatggaggtcgccatcagcaggagcgtagccggatcgaggtctaggatcccggcgagcctcaccaggacgtcgagtccaatactgacttctccgcgttctatacggctgaaatgagagcgcccaagattgttgatgtcctcttgggacagaccttggcctctacgaattccacgaaccacgacagccagtgcttctgccgcatccatcggtatttccccaaccaaatccgaggataaagccacacctagtagtgtcataacacgcccaatcaggttcgttatgattgccttggggcttatctagaggtttaatagctttaacccatgcgtcacggccacgaaaaagcagccctgtcgtggatcagccaagccatcgtgagcggcgggtagagagggttgaattgtcaatttgatgttaattacttaggggaggccttatggctagcgtcgtagaacccgactttatgaaggggccacgtacaccactggaaggcctgtcgagcagctctgatgcacgagcgctggcgaaccaacgttttcccgaaaagccttactgcttggttcgagactggacaatatttcgcattgaagtcacccgcgacgaactcttcaaatgccatgcagcgggccagctcccgatgatcctgtttgctcacaacgtggcagaggacagccaaggtcgtttcgaacgcggcgattgggttcgttcaagcatgtgcaccggtctccacgaaggtgttgcgttcgagaccagaaactctgtttacgtattgattggccctggtcatgaacagctcgcgagcctgaaagacgttttctccctcttctaacctgcgctctatatcggagccccttcaggccaaggacatacgatgtttagaacacacgacgccgacatgctgggcctaccgggcatgttcggtgagggtcagtaccaatggcatcaggtatccaaagtgcttcgtaatcactggtatcacgtaactgtccaggccatgtacgaggacagaatttcagaggcgattctgatgatcgacagcgaaccacggcttcagcaactgctgattgcccaagacgcggagacgatcatcacagaggtgcaagtagtcacacctgcccacatgaatggcacgggagtttggcgcatggagaaactgaccaaagtgacgcttggtgaagaccaacacgagtgtgttgtctgcctgctggaggtcgagacaggctccaaatatcacagctctcaccaacctggcttcaacactgatgtgctgagcaatcttcgtccgatctatcacgcgaacatgattcgtacagcctgagatttaccaagaatcccgcacgatatcagcgcagatgtttccgtgcggatttcctggtaacgccatacgggctgcgaaaggagcgcaattatgctgaacactctggatgtggattttcatggaaaacgacatacggatttcgatctcgcacgaatcctaaaagcaaaagcgcaaggcttcgaaaaaccgataacagcctatctctgcggagtatccataaaggctcgtgctggattaggcgtcgtgtttggtcacaaccgtaaagaccaatatggacgtttcggcgacggtcacctgatccggacttctgacgtgattaaggcggagcgcgagggccgattttgggtacttaccacagagaattcacgctacgtgatcgcgacgtttcagcacggtaatgggcgtgcgagtcttcgccagtttctgcgattgtcagacggccaacaccatctttccccgcacttactgcagtagtggcgcagccctcaacgccctcattctgcggtatgcctttttcaaagcaaggcatcgaaacctggtgtcttgttggaagcatggatgttcagccggcactgcagcgccataccgtaagctgtctccagatgcgtagccagcgagccacccatttcgatatgttgagataaaaccacctggtgatctgcatctgtaagaacattggtgaaaatgagccaggaatgcatgtgtggcgttgtctgggttatcgcttgagcaacactttctgagagagctctggccttgcgatcatcagtgatgaaggcttggcggattctgcttgcgaaggcgattgacgacagctcgccttttccgagtttttttcggctttcaagggctgcgatggcttggagatcgtcaatgctgcaggaatgggacgcgaatttgcccttggtctgctcttgcttgaggcgctctctcaactcgaggtctgcttcggtggcggctgtgcggggcttgaccaggcattcgtataggacgaatccagtcatgcagaactcacacttggcttcttgagctgccgcatacagtcggcgcgaagacaaaatgttccacaccgagcaggtgtcggccacattgatcttgtggaatttcgatggatcaatagccatgtattgtccttccatatagagaggcaagtgctgccagttcgccatagccgcagagaagagcttcggccagcctgccgaggctgatgatgccttggctatgtgcgtccaggcaaagcttcacgtaatggtcggacagaccgcgttcgagcagagcgacttttctcgcgcgttgctggagggtgaggctctcaggtagttcggggtctatcttggcttgtcgagtaacacggtaacctcggattcgtcgactggtatcaatgtcggctcgcttcgcggccttcaaggctatacccaaggcgtcacagctcactcgaaacttattagcccatccttgagcttcctcttcagaccaagtagttgggtcaggaagcaagctgagcgtttctggaggcatgaggtaacaggaggcgaacctattcgcccgcacctcctggatgtctttgtctcccgggatggttacgcttgctccttcttcactatcaaaaatgcagtgagccatctcgtgcgctgcactgaatcgctgtcggtaaacgtcctcggtgtagttaactaaaatgcatttgccggcgacggggtgcatcacaaagaggcctgagattttggagttgtctagctttcgccggaacacatgcacaccgactgagcgaaactcggagtagatgtctcggggcacctctcggtctgcatgacccatttgccggcgaaatgcctttgccgcgccctcggcatgagataggaagtagttaccccgtggggtgtaggcaaaggtactgacagcaccacggagttctcgggttaaaaattcttcggtttcgcagatgtacagaaactcttgaatggcagagcgatcttccttcgagaactcacggccatgcgcccggtagagcgtttcagtttgctcaaatggggcgacctgctcgtttgaaataaagaatttgaagtcgcatcgatagtagtcggcaaggatgagcacctcgtctccggtaggctccaacgcacctttctcgatactactcaggcgctcaacgttgattgctgtgaaagctgcgacttcgtcaacggttcgctcaagctgaatacggtagcgttgaagcttgtcgccaagggcctggagattcatgcgctgtttgacgtcctgttaggcaatgcaccgagacatcatagtcggttttcaaggcgctccacttctcgagtccacatctatatcgctttattggagcttgaatcgccggattgttagttggatcgctgagggtgcgagtcttccccatctcaccattcgttgaggtagcatcagcagcacaaactgcgcttaccagcccaaaccgcgctatgcaatttccaggaggaagtccatgtccgacgaatctagtcgtttgtctttgtttgaagaggactatcttctacgtgagcttgggcctgtggcccatgtaccgcaggtggcgcttactgagctggtcgcgaacgcttgggatgcaggcgcaagtctagttgaactgtttcttccatctgaactgggtggcaccttgactgtgatcgacgatggtcatggcatgacgcccaaacagtttagtcggcgttggatgacgcttcgctacaaccgactgaagcatcaaagctggaaagtggagtttcctaaagggaaggatggtaaagccagaaaagcttatggccgaaatggtgtcggtcgccacggacttctctgtttcgcggatgagtaccgtgtagaaacatggcgagatgggatactcagcacatttgtcgtgggtacggaatcagggccgagtccatttgtggttcgctctgaagagttcagtgagcgagagggtgaaggcactaggttgtcggttgtagtcaatcgcaaaatgcccgaccttgaagaaatcatcaccgttcttgcagcacgcttcatccacgatcctggatttcagatccgagttaatggaacccccctgacgttagcaaagcttgagcagcacgccaggtcgcacacgctgaccctcagtgaggggcggacggcgaaggtgatcgttattgattctactcagcagaatcactcatcgattcatcaaggcgttgcgttttgggtagatcatcgacttgtcggtgatccaacatgggctatcggtcaggtagcaaatttcgatggccgaactcgattcgccaaacggtacaagatcatcgtcgacactttgggtttcgaggatcacgtacttgcggactggacaggatttcgtacaacgccagcagtaaaagagttgtatcaggctacagccgaccacatcagtcaggttgctgatgagttagcagcagaagttgtcgagtccacttcagaagacgctcttgtccagaatcgtgctgaactcaagtcgttgggccagggggcgcagctcgaagtcactgaatttaccaaagctgttgctcaggcgcatccgatggtatctccggagtttttggcgacagcagtcaaagcggtgatcaatctggaaaagtccaagagtggggctgcgctccttcataaactcgccaacctagatacaaaggatgttgagggactcgatacgttgttggctgattggtctgtcaaagacgcacttcgcgtgttggatgagatagatgacagactgagcgtcatagaggccattgctaggctggcagaggatccgaacacagatgagctccacaccctccacccactgatcttgcgatcccgctggcttttcggcccggagttcgaatcagtggaatactgttcgaacaccacattgcgaagcgtagccaaacagctatggggcgacggggacgcatcgtttcagaacgagaaaaaacgcccagacgttgttgtcttgcctgatcgcagcatggtgcagctggtgggtatagagcgatttgatccgcaagacccgaccatcgcgcagatgcagaacatccttctgatcgagctgaagagagggggattcaaaatcaagcgggacgaggtcaatcaggccgacggttatgtgcaggatattgctaattctggatatgtaaatggcgcgccctttgtcacggcctgggtggtcggacagtcaattgcatcgggagtgggtaccgagaaaactgtaggtgatgactcgcgcaaatatggtcaagtcagagcaacgacttatggggcacttgtgggcacggctaacctgcgactgatgcgcttgcgtaagacgctggaggaacgatatgacaacctgccaaccgacacgttgctcgctaaggtgttatcgatccaagaacaggcaacgctcgatttaaatacgtcaaacccagtgcaacatcaggatgagagtgctgcgctggcagtcgctcagtgaagcatcgtatcaatctatgggttgattacaggtattagcgccgtcgcaattccggcctgtcgtcagcatcatagatttttccgcctgtgctgaagcaatcagcaaggctagttttgccaaaacctaatgaaagataccttcaagccggtgtcaaatactcaaggactctttgtgccttcaactctagtagacattatcatccgcgaccgaggcgcgcaggcttataccgattacgcggagtttcaaattaccgatcctgatgtgatcgttagtgccgctaggcaaacgctcgaatcgatccctccatcatttggttcttgcgtcatggtcagtgctggcttcactgcaattctcaaatctcaagggatacccgcagttgtcgtcctgggagacctgctgattaacggccagtatgctttcgaatgcagggggaacattccaggggcaacctacgagggagagtttgtggacgccaagtgggacggtcacgcttgggtaatgctcgcaggtgtcctctgcgacctgtcgatcttccgaagcgcctacgccactaaaacgccaagcaacctcaaaaccttcatcagccagcagttcggtgagggtaagggagcactgatgtgtcctcacgatagcttgccggtcggcatggagtttgtgcccaaatttgcgctcaatgacgatcagattctggggattctggacggtttgtccaggcaagcacttgagactaagtgacgaaattcgaggcggcattcccggctgtgtcgggagctgaatacggctagaaaataagggcggcgctgacatcagtgcgagattagccaggcttccattttttgcagtctgcccatttcgagaagcttcggttttcctaaatctaaaagcatgagtagctcttgcctgcactctggtgatggaaaccattcagcgacctcgacattgcagtgcctggactcactcagggcccatttcacaaccatgtccgctgctgctcggtagtgatccgccatgaagagtcgtcgcccctctgcaaaccaaccaagcttggctagttgttcagtgacgtcaatgacgcccgcgtgatcaaaaaaaccggtggtgtctggatagtgaatacctgccagagacaccttcgccgcccccgcttctcggtcgaagtaggacagaaaatgccacccacctgtagtgcttccagcgtgcggaaagttgatcgcggccttgccagtgatgtagtgcgtgcgggaaacgcgtttcagatcaaagtcaaatagcggctggttcatgggagcttgctgagacgcgccaagccttgttttatgtggcccgcgttttcgccaattgtgtagagcgcgccacgaacgttggcgccgacttcggcatgtccctgggcttccacctggagggtcagttccatgagcgcagcttcgagagcgagttggttttggtacatcctttccaaaacatctgacagcgagtattcaccgggcatctacatggactcctttattacgacgcagcatagctcagagatgagtcagcaagtgtcttacgggtagctcccggtgctcagcaactttgaactaatcatgacgaccacgcccctaaccctgtgcagatagccgctagctcaggtcaaccctgagcatcctatttacatacaaaggtttggtgaatcatgaagagcgaacaggtagaaggcgttgtagaaaaggttgccggcaaagcgcagagcgcagtcgggaaactgtttggtgattcgaagcttgaagccgaaggtgcgggacgctaggctgccggtcagttgacccaaacctatggcaatgcactggacagtgtgtctacgttcgtcaaagagaagccggttgctgcgcttgcaattggtgcagtagccctgctggtactagaccgtctcctgcgccgctgaaggtgggaggaaaagccttgagttgcttctcccgaaatcgtctctcgtactctccagggctatctctgaagggtgcgagggctatagggataccctggagagcactttatgagcgtcccgtccctcagtagtctcgaagtgtttgatttgcaagctggcacagcaatgagcccgaaggacagagatgccggctagacgcttggtcggtttttattgatccgccgtaccggatttatcagaggccgggcctccattgaagctaaaatcggtggtgccgttggtgatccattcgaccagcttttccttgtgtgtgtaagccaccactccacgtttttgagtcggatcgaatcttaagacgcgccatataccaaaatcggggccgaagtcgatgaacacgggtttggaaacccaccagcgagcaaaaagcttgctgcgggaatgccagctaaatgaagccagtccattctccgacacttttgacaaacccattctgaagttgtacctgtcgaactcagttcgcgtgccatcgatcacccagatcatattttgatagtagttttgcctcgcgatgacctcttcaggatgtattgtcgatctctgaaactcaataaccatccctgaaggcgttcggacatctgctatatgtcgctcccctgaggacgcttgcaacacaacttcctgccactcggttgggaacatattcttccaatcgcgatgccatgccgtttccgtttcccaccacggatcgcaattgtccaaacgtttatgagcccaatgccagacgacatggttcccgcatttagcgacggtctgggaaccacaaaaactgcaaacaccacgtgcttttggagtggcctctacacgagcgccttcaagcaatgagtatttcattttcttccttgatgctaaaaatgggggggcggcagctcttaacttcctagtcggcagtaccttgtaactcacaggacgaaagacaaatatctgagcacggaagtcgtcctagcagcctggcaggcctgcgtaaatgtctaaagaggcgggtggcggagggtgccccacttaaatcgccttcaggagacgctcaagcgtttgatgctcccatgtgctcagcatagcaatgggatctgtgccaaagcgatttcccgagtctaaagaccagcgccgtccgtcagggcttatgcactcttcgcagtagcccagctcatcgcggtcgttatgaatagatattcgccaaccttcgacattaactttgaagcgctccgcataaatttcttcccatcccctctcgcaggctctgaccataattaggcgcccaagagctacctccctcagcacttgcctgacctctcgcgctgagagtggagccccttcggcagcgccatctagctgcgacgaacgagctgccgctctggcctctttcaacaattgctcagcgtacatagccggatcatcatctggcagcgggtagcctgcagcagatagagcttcggcgcgctcttcaatgagcagacgctcgggatcgcgaaccgtttggtaggctctgcctggtacgcgtcgagttgtgtccattcccggctccccagaaggctgatgaataagagcgactaaattacttttagaacgataacagaacgcttcgaatagcgatgccgagctccgaatcatgagggtaggatgcattgcgatctatgcttcacataggctcagacaccaagcaagcggagcgcgcaggcgtgagggatgcgagcccgcaggggcgagacacgccttggcggggctcgattcacggcagcctgacgccgcaggcggcacgccatcaacgccaacaagagataactcaaatgcccgacgatgaactccgcgaactggaggccaagagacgaaaggctttgtggatgcttgcgaacctatctccaggcgattcgaaggcgttcgatcccttatccattcttgatgaccttgaacttcaagagcgaaaagactcccctcatgctgacaaggcacttgagctcaaccagcttcgggattgtgtcaccgtgcagtatcaccacgccggaattgacatcattttggagcagactatcccccagccctggagggagcgcttcaatcaggcgagtatcgggtcgaccaaattgttagatgggccttacgctgcggactggtataaattcctggcttgctgggaaacagagacgcaacacctagaggcacacagagctgcctgcagtaaccccaagctggattgatgcagacggagaatagacgtggaacgagacggcgatgacaccgtgtactgcgatatccagatgccagcagccgaaggcagagagcttttgcaactggtaaacaccttactagattcgaaagcctacccgagcttggacaaagttttcgagcacatgcagtacgagctcagcacatcgattgatatcctggataatccgcaaaagttgggccgatggcgcccgacacaacactgactgtaggtgctggcagcatgtcgtccagaacaccgccatcaagcgtggagctgagttcgtaacgaactgcaggtatgttcctcggattgatggaaagcgaagtaatcagtgaaaatttcgatgctgtgccatttgattttttgcaaatgaattagccaaacagtggcatactgcctttatttaaacgaaaggaatcgtagatgaacactcagctaacgcagtctcaggcagatcagattgacttagcactccataagaatatctacccgaggttgggaggaggagagcttacccaactggcgaagctgtttggttctaacggacttttaaggacgctgcgtacggttcttcgtccgccaccgccacctcaaccgttaaggggaaatccacccaatgtgtccgtaacagttcaattggcatggatcgacaaaagaccatatgcactaatggatcgtgaaaagcataaagttgaaattgctgatgttgctgttttttattttgatacaaaccggtggagcacgggaagtagcacgacagctcggtgcctgcttttacaggccaaagcagttaagactgcggctcaactatcggcacccacagtttgcttaaaccctcccgcccctaaatcaaatacaaccactgaacgagagcttcgacttttgtcgaagtggcctaagtttgatatgtatttgggctccaacagcaacattccccttgctactaacatacaggttcccttctcaaccagtcctccgccgatggggtggtttatgggaactccgatgatcagaccttccagttcacaagttggcacctgggttagcccatggatgtgtgctcctgcggagcagaatcacgcgtgtaatgaaacattgggaagtttactgtgtaggcatttttctggaggccagtcatcgaacataagcaagaggcccatagatgcgggcgctcccttcaactacgctcccgcctcccttaatcacggaaaccccacgtctaccaattgggatcggctgtgcatcgagatgatcagagccgtaagaggccagataatcccacctcatttgacaaacggtgcgccccaaaaccggttgcagcgggctgtgatgtactcgttcccagtgtggcctgcgcttaaagtgcttgctgcaaccgcactaaatatattgatgcggtttagcaaaaaacgcatgccgattttgattgtttcgcgagtatttgacgagacaccttagtcgtagtcgatttagttcgctggaggtgtccatgcgatctgggctagctgctaccttgtgaccgagatttacaggattcagttggctcagccgagtcatatcaggctgagcgactgataagaaaagctcgttcccgagatgctccttccccacgatcacgaccgcctgcatcggtttgacgagagcttgagcagcactgattcaccatctgcaatgcctcgggcagcgcggatatcggtacgtatgtctatcggctcgaagaccggttagatcacattgacgggaatcagtgagtgatagccctaataaattgtgcacaaatctcaaaatctgagcttggacgtttcccgtgagtgcttgcccgcccaacgctttgagctatcaacgctccatgccccaggcatccatcgcctcagtgacagtcgcataccagtggagctcaccaacctgtaaggcattcgcgatttgcctgttggtattgccgtcgccccaagtcgggagactctccatggctcctgtgaaaagactggctgtagcgacagcgaatcgccccgtacttgtagactggaggcacacgtagcgcaatgcagcgccactggaaagcctacgccaggccacgacctcaatgcagtccattggctccacaggagcctcgacggcgaaacccgcgccctcatccgccctatggctctcagatgctcggaacggcccgccaagcgctcttgggacgtgtacgaggtgcttcaactgctcacgtgcggaggcaatttgctcccggaactcttctggatcaatggacatggccccttccggcgtcaccctaagggtctggaggctgttcgcggcttggatgaacgcaagttcgcgctcaatctcacgctgaggacggcggtcttggcggatgagatcccatagcgcacggactattcgcatctgactattctccctggtatcggtaaacccacaccggcagcgcgtgaaactgtgatgactcaggttcacaagccgttccggtggagcagcaacactactcagcactctcgcggctgcttagccgcatttccagcttttcaaccagagctttgacgcttcggatctcaaccgacatatcaattttttgcagcttggatctatgctccagagcagtgagcgtgtctttaacagagtccagttcgtcttgggtctcaagcatcgaactgtaggtagaactcgaggtgagcgccttatattcagcgtgaaaataatgatggagagaagcagggtcagagtggccggtgagttgggccacctctgcgcaaacatcgtctcgcagcgccggcgtccaccctttctttagagcgggggtttgggcgaatctttcctccagcctgatattgatttgacgcgtgacaaaacgatgtctaaacatggacaggcaaacacgggtacctgacaaaccagcacctaaacacagtcggtcaaactccttagtgattgactcttttttcagtcgactaccgttttcacctaggaatatattgttgggctggtcgaaaaaaatattacgatctgctaggaagtcaatgtaagcgttcctggcttcaacgtaaattgcaaaccgccttgcatctgcagcattgattttaaaacggcgtaacggtgccggagttccgcgctttttagtggggatcacaatctctagtgtattcgaaatgttttgattgagctgaaggtcgaggtcaaatagctcctcaggacgtagtcctgtgagtttcatcattcttaacgtgaacatccgccgctcgtatagatacacactggtagcatcgtagagtttgaggtcactgattgatttaagcttggagctagcaggcagatcctcccagtctcgcttccggaaaatctcatcctggattttttggatgatgtgttcgtctattgccaccttgtcatcgttgtacggcacgggagctacgagcaggggatgaaccatgtaggatcgcttggttttgggatttatctcataagatatcgtgatatttgcaccactattctttaggcctaccaacggcgttttagaaagatctggatagttttctgttagccagtgcaaaaagttaagcgtggtgtgctggattagcctggtgcgattgttattccttgctggtgcgataccacgaagggtagacctggtttcttgaactagctgttcagtaaaatccttaaaattagtttcgttgaaattgctgaattgaatgctcttgacagagcaaaagcgaatgaagtgcgtgatgagcgctgcgtctaccctcgcagaatctctggcgcctgtggacgcgcagatctcagcgatccatagattggcaaggttgcacggcctaccgttaggccagcgaataagtacgaagttttcgatagtgcgtggctttccaatgaacgcctcagccttccgaatcggcatagctttgtctggcaggcttacggattcatattccgtgtagagttgcttacccatcctttttgccgccgtcgattaccttcattttctctgaagaaaatatctggtcgcttatcaggaaagattgatatttggccttggatgttttgactttaagtctgatggttgcgcggatttcgtcagcgctacggttgctctgagggtcaatacgctctaggaaagtcaggatgtcaaagtacgccatcgaggcgatgtgagcctccagcagcgcgatgcgtgcctgatccttgtctgaaggaaggttaggtgcaggcgccgggttaaccttgggagtcaacagggcaaatgccctggatctcatctgtagcatgttgtcccaaaggcttgacccagagatgccaaactgtgcgaccttagccgcttgcttcagggagttgagcgaaatcgatgtgaagcagccagcgacatccagtttgcagaagcctcgcatcgaggatagggctcgaagctgggctttcgacggtgtaatttcttcagatagcacctgtgaaagccaagtgtgacgagagtgaagatttttatttgttgtatctctcatctttttggcctcctaggcaaatggcgaaatcgatggtgtagatttcttcgtcgtaagattcaagcctgaccttatatgtggtcatatcgaactcaggttgttgcaccattttgtctaggtatttgagcaattccttgttgctaatcgaggcgatgctggtggctttgaagtgcttcaaggcttctatgtaaagcgctagaagcccttggtttgtatctttggacagcaagccgttttcaagagcaatgagcttgtcgtcgatgcattcggattcatatcggacggcttccgaatctgacggttcataatctgtgtaatcatcaatatgcttcctattggagtgacctgccatatacctcagcaattctttccctgaatctcctacgtgtctatgtacgagcaggaggaagaattttctcatctcgtgaatgcgcacataccatcgccgacctattttatcgacgggcagttggatagcatcgcagaaagtattaatgcacaggtttactttccattcgggaatttcgccactagggcatttgaatcctctgcccggaatataaaacagcctccctgcgtactctgattcatctccatagatatctgctagcttttcgccgagcacttggagtagctggatggcatgggcagcaacgtagggaatagggcgctcaatgaagtcgtttgcacccaactccccagttttgccaaccatgtggcccataaaagcgccattgttgccccggtcagtagataggcagttacgttcaagggtactaagctcagtattccgaataggttttacgatgccgataattatggcgcaagcgccataaaaagattccatcaccattttgtagttggttttatctacagggaaatttttcttctctttggtttggagcctgcttatgttgagcgcttggaatagcggctgggcaggtaggttttccatacctctcgtcatccaaaggtgttttgttttctggaagagctcgttcttttttacggactgtttcgacaatgaattgtcttcgtcaatagagacgaattgctcgatgtaaaaaatcagagactcaactatggcatttccgtagacggttatccacttgcaggcctgattcaggcatttgaagccaatatcaagaggtagcaatttggtgtggccacctggcttcaagtgtggcttgtaatcaagaacaagttgatcaatgttcagcttaatgtcggggatgtcttcgggcagaatatcatggccttggaaaaataattttaggcacgacattgtatccataaaagagctgatgcccatcgccccgtcagctgcttcatctattgtcttagtattttgagtgctgtgaaggtttgctcgtacacctctttgtagtaagtcgtcatgggctaaggccggctcaaactgcctaatgaacagtcgaaaatttgcattatgcagagacgttgaaggtcgaccgagaatggagccaataaagtctcttgacagcaatcctttatcataggtgctgttttgggcgctggagacatagagatcgtttcgagtaaagtaggaaatcgcttctcttgtgagctcaactggcagggcgtccgggtctgatataagatcttctaatgagaaggagagaggtaaaatatcgagcaggtgtgaaatgaaacgctccttcaacaacaaagcagcagtccatccaccctgactgaaagtttcggcgatagctttgcaggcgtcctcatcgaagagcctgaagccatgcgtactggtttcataagtatctttataaagattggcgcgtgccgccaaattcatagcgaagctaaagtatgtgatccatcgaccttccgcgactggtttacctgtaatggtgcccatgcgacagtgaaataaccatttctgcaccgtttccagcagcagcttattaggggcgtcggtgaggttggtgccgtccgccatcaagcgatcaaagctcatgcactgaagctttgacccacctggaaaactgaccagccattcctgacttccgatcccacctcttaccagccaatctgcttgatagctgtggctccttttatagattttgctttgccgttccgcgtgctcgatcatcgctttgatacgacgttcgtcgaatgaaaagtcttccattagatggccttccaatcggaaagggagactagcggacgaaggtcttgcttcaggatggtcgcacgagcatgcgattttcggagttcactcatggagtcgcccgaaaccctgcccgcaatagccatctcagcgttagatgcgctatcgaaatcgagggaaattgttttcgctactaaatccctgagcaccgggaagatccataagggcacgctagttcgctcatcgatcactaagcgttcttctggtgcaagcttatcgacggcatctgcgtatgcgtagatcgcggcaaggctacccgcactccgatcaaatagcagctcgcgctctacaaacatttcaattagagagctggggtcaggcgagtaatgacccagcttcgagcgtaaggcttcgcttaagggatctcccttcttaaggcctaatagtatccgtcggacaaaagcctgtagctcttctcgagtgctaaagtcagatgcagctaactgccaaggctcgccctctgttgctactaagatgaccttttgatgtagcaccctgaaaaacctcgtcgcccatcgatgaaccatccaggccggaatatatttatctctgaccacctgcaaagagttacccagcatgtccgctacggcctggagactaccagtacgcaaaaactccaaaatcccttgagtgcatcggatcgtgtagagattgaccatgcttggagttacgcctactttgtctagttcatctttatataaatcgtgcagagagagtccggcatttgtagtcaaggtttttgcaaagttaggactggagccaatttggtttctgctcgagacaaggaacagcttcctccacccgctcttaccctccgataaaaggcgtcgtcttggcatgtttgtacaccgaatcacatccataacgatccgagtgctcaatgggggaagtacagagaccttgcgtgactgcgcgcgaggtttgctaacgctgactgttattcgcttgttgtcactattgccgcgtaggtagaattttccgtctcgtcggtataaccttatgttggtcagtgatgatggattgaacgaaggattttctgatgcaatgatcgcacttgcaactgcgcagtctctgggtgacaagtagccgagtagtcggttgaaagtttcgttaactgtattgttatcgatacagtcgtcgccggcagcctcccacagtcgtgccctaagttttggcttgctatgggagttgtagattacgggcctgaagaaaggtagttcttgcaggtcgtcgaatgtcatcgatttaagctcgtcagtctgttcggcgtaatatcgagcgacggctagaaaccagttaatacctgtaggcgaatctggatgcgcaagatgaatcccatttctgctgaattgtccgctctcaagcaccgcctcgatttcgtcattcgagatgttcttacatagctcatcacctcgggcgtggcatcttagcattcgattccagtagtctaccgagcattcgacaatggcatcggcccttgtctcgagagtgttcttaagattaagtaggtacacgtcatcttcaaaactcaagccttcttccacaaggtattttttgggaagtagaaatcgtggccctttgggaataggcgtgtgcacagtcccgtaaccagccggttgagacatattctccgggtgactgacggagttcgcttttgcatctgggatgaatgtgtcttccggtataaatccatcccgcctcagttttttgtaaacaaacgccaccgcgttccaatggtcatatcgggttttgggcttatgatctttgttgtagaggtgatgggagtagtgtgtaagtatgaagttgctccagtcatcttccgcaggtgggaactttaaccggagcttggcaacgtggttgaaaatatatctacttgcccggaagcgtcctgaatagctagtagtctctccagtgatgcataataccctaaccgcatcggctactttatagagcacttctttgtcgacccacgatggagtgtggatggtagaaatcctgtagccgcgaatacattcatcatcatcccgcttgaatatgatgcgatcatcctgcacttggtaggtaagcataatgagatcctacgttgaaagcggcatagcgtagtgatttggttgctctggtcaagaactttcgtgcgtgcttctaaagttttaaacagtgtattaaaagcatactcttacatgtatttcggggcgggattttgcattaatctcacgtcgcagtgaaaggttggccgacaattgatatgttgtttggtatatctgttggtctgtttttcgctgataaggaattgccggcgctggacgctgatcagcgaatacgccgggtggcaggattaggctggacaagagggttcgtcgttatcggcatacataagcgtgggtgagtgcaaggaaggcggttgctccttcccagtgtacttagttcctagggagtatttcactgagcgattgcttggtcatcctcaaccaggtggtctctaatagctctttgccgggattgctggcggggcattaattaaagcaatattgacttagcgtttgaaccaattatcgatttatctcgtcgccgtgttctacggaatacaagcactacctccgcatatatttagtccggttggtgttcggcccctagcttgtggtatcgagtctaatgttaggctccgaatcggcttgaatcacgtccagcgcaaccgtgatttttttcaggtgtgactggacatcccgcgcctcgccgcagacagcactgcgatatgcgcctgctgtccaccgttgagattggtgatatgtggggggaggcaaaggcgatggacggtgcgctagggcttcccacccgtcaatccgagatgatgggcaacctggccacgatgaactcatatcgatcattgtgagatctctcttccgttctcagcctatgggaggtggtggagtgtcgatgaattcagcgttttttccgtctggggtatccgaagcacatggaaatgggtgtcaagttttaggtgtcaaaatcgttttctaagctgttgattcgtatagggttacaccttctagatgaattcatgtgtctagaaaaggattttgctcgacatcaacgggattctcggcctggccgcgctgatgggcggcatcaagcatggtgaacagtcttacaacgacgattcggcacgcacctatagcgtgatgatcctcaccgccatgggtgtgtcgatggtggtgccggaatttatccccgaagccgactggaaaatttactcagccttcaccatcggcgcgatggtggtgttgtacaccctgttcctgcgcatgcaggtggggccgcacagttatttcttcagttacagctacccggaaaaacgccgcaagaaactgccggaagagcaggaggagccgccggtcaacctggcgttttccatcggcaccctggtgtttggggtgattgtgatcggcgcattggccgaggtgatgtccaagactttggacctgggcctggaaggtacaggcgcgccgccggtgatcacggcgatcgtggtcgcggctatttcggcggcaccggagattctgaccgcgttacgtgctgcgttggcgaaccgcatgcaatcggtggtgaatatcgcgctgggtgcttcgctgtcgacggtgatcctgacggtgccggtgatggaggcgatggcgctctacaccggccagccgttccagatggcaatgacgccggtgcaaacggtgatggtgtttatcacgctgattgtcagcgcgatcaacctcaacgatggcgaaaccaacgccatcgaagggatgacccattttgtgttgtttgcgacctttatcatgttgtcgctgttggggctctgaatcaccgagaaacagtgtgggagggggcttgccccctcccacatttttaatcggcgtctggtctaggttccggcgatcaactggcgcgccgcctgggtgtgatcggcgatcaggcccttgaggtccaggccttcgacctggccatcgatcacgcgccatttgccgctgatcatcacccgatccgcgcggtctgcaccgcatagcagcaacgccgaaatcggatcatggctgccggagaaacgcagctcatccagcttgaacagcgccaggtcagcctgcttgcctacggccaattcgccgatatccgtacgccccagcaactgcgccgaacccttggtcgcccaactcagcacgccctccggggtgattttttccgcaccataacgcagccgctggatatacagggcctgacgggcttcgaggatcatgttcgacgcatcgttggaggctgaaccgtccacacccaggccgataggcgcgcccgctgcgagcaggtcccgggtcgggcagatgccggaggccaggcgcatgttcgagcttgggcaatggcagatgccggtgccggcggcgcccaggcgcgcgatttcatccgggttgaagtgaatgccatgggctagccaggtgcgcggtccgagccagccgacgctgtccaggtagtccacggtgcgcaggccgaaacgttgcaggcagaagtcttcctcgtcgagggtttccgccaggtgagtgtgcaagcgtacatccaggcgattggccagttcagcgctggcttccatgatttccggggtgacggaaaacggcgagcagggcgccagggcgatctggatctgcgcgccgtcgccgcgctcgtggtatgcgcggatcaggcgctggctgtcttcgaggatgacctggccttgctgcacggtctgttgcggcggcaggccgccgtcggcttcacccaaactcatggaaccacgggtgagcatggcgcgcatgcccaactcgcggacgctttccacttgtacgtcgatggcgttttccaggccgtcggggaacaagtagtggtggtccgccgctgtggtgcatcccgagagcagcaattcggccagtgcgactttgctggcgagagcgagcttttccggggtgagccgtgcccagaccgggtacagggtcttcaaccagggaaacaagggttgattgaccaccggcgcccaggcgcgggtgagggtttgatagaaatgatggtgggtgttgatcagcccgggcaggaccacatgttcacgggcgtcgaacacctgcgcgcagggcagcgcgggttcttggccctgggccaggacttcggtgatcacaccgtcttgcagcaccaggccgccacgggcatcgaggccattggcggtgaaaatcgcgaggggtttttttaaccagatacgggtcgcaggcattggccggctcctctgaatgatgggttcaggtttgccagctcagtgttgccctgtctgctgatccagggtcgccggtgaaggcgagggggcagtctacgcgcggatcgttatcgacggcaatcggtcgataacaatcccgcaccgcttaccaggcgatggtgtcgcctttgtagtcgatgaagtgatggccgcctttgccggtgtaggcgttcacctggtcgaccaggccgcgcacgctggtgtcgacatcgatgtgcgcgttttcgccgcccatgtcagtcttcacccagcccggatgcagcgacaatacggtcagtttgtgatcacccaactgagtgatgaagctgttggtcatggagttgagtgccgccttgctggctttgtacagcgccaggtccgagccgtcggggatggccacgctgcccagcaccgaactcatgaacgccagcacgccagtgtccttgcggatctgcccgacgaaacgctgagccaggttgatcggcgctacggcattggtgaaaaacagttggccgacttcggccagggtggcgtggcccggctcctgattggcagggcccttgacgccggcgttgacgaacagcaggtcgaaggtgctggccttgaggcgttggctcagggcgatcacggcttgctgatcgtccatgtcgagcttctcgatctgtaccggcccaacggctttcagcgcatcggccttgctcgggtcacgcacggtggcggtcacgtcccagccgtcctgaagcagttgcttgaccaggccgaggcccaggccgcgggaggcgccgatgatcagtgcggtttttggcgtagacatgaaaagcttcctttagcgtcgcggttcacggagttcaacgttgtagcaggatacgcccacggctgaggtcggcgagttgaatttgcagggtgtcgatatgcgcttcgcccaaggccagttgcagctcgacgccgttggcggtgaaggtttcttcgaccaccagtccacccagctcagccacacgcaatttcaccaggttcagttcggcgaagccacaggcgcaactcaaggggacacggctgatcagttcgatgcggtcggccgtttgcaggcacttattcgcgccaccgccgtaggcccgggcgaggccgccggtgcccaactggatgccgccgtaccagcgaatcaccagcaccgccacctgatcaaaaccctgtgcctcgatggccgccaggatcggccgcccggcggtgccgccgggttcgccatcgtcgttgctgcggtattgatcggccagtttccaggcccagcaattgtgcgtggcgttcaagtcgctgtgttgctcgaaaaacgcctgggcgtcttgcgggctggtgatcggtgcggcgagggtgataaagcggcttttgcgtatttcttcgcgaaactcgcaaaggccggtgagcgtgaaaggcataagtcgcttcgtttaatgggcgggcttgatgccgcagcccttgaggatgatatggatcaggttggtgccggcgtcttccatgtcctgcttggtcagcttggtgcgaccggtgacgcggcagatctgggtggcgaagtcggcatagtgctgagtgctgccccacagcaggaagatcaggtgcactgggtctatcgggtccatcttgccggcgtcgatccaggcctggaacacggctgcccggccgctgaaccaggcgcggtagtcctggctgaaatattcggtgaggcattcgccgccactgatgatctccatggcgaagattcgcgaagcctgtggctggcgccgcgagaactccatcttggtgcggatgtagcgggtgagcgccgcggccgggtcatcctcggcggtcagcgtgttgaaagtgctgtcccacagttcgaggatattactgagcaccgcgatgtacaggcccagcttgttggtgaagtagtaatgcaagttggccttgggcagcccggcactggccgcaatggtgttcatgctggtgcctttgtagccatggcgcgcgaactcgtcttcagctgcctgcagaatcgcttgttcgttcttttgccgaatgcggctggcgggcttaccggcgtgggtgctgtgggcaggaacttcgaggctcatggaggtttccgtgctgatcgattgagacgacgtgtgcacagataacccaccctcaagcctcagacaagtcctgatgcaataaaaccgtcaaagcggttccaggctgtcgctttccggcgctttgtttgcggcagcgttgagggccttgctttccggcagcagcaagcacaatacgatggccgtcagcccgccgctggtgatggcggagtcaaacaggttttgtatgagcgtcggcatctgatgcagcaggttcggctgggcggcgatgcccaggccgacgccaaacgaagtggcgatgatcagcatgctgcgccggtccagcggcgcctgggcgaggatgcgtacgcccgcagcggcgacactgccgaacatcaccagcgtcgcgccgcccaataccggcttggggatttgctgcagtactgcgccaatcagtggaaacaaaccgagacaaaacagcaccacgccgatgtacaggccaacgtaacggctggccacgccagtgagttggatcacgccgttgttctgcgcgaaggtcgtgttggggaaggcgctgaaggtggcggcgatcatgcagctcacgccatcaccgagtacgccgcccttgagtcggcttatataagaagggccactgataggttggcgggcgatcatgcagttggcggtgaggtcgccgacggtttcaatgctgctgatcagataaatcagcgcgatcggcaggaaggcgctccagtcgaagttgaaaccaaagcggaacgggatcggcaggctgaccagcggcaggtcgggcaaggcttgaggcacgagcttgccgctgaaccacgcagccaggctgccgagcgcgaggccgataatgatggccgagaggcgcacccaggctgtgttcgaacggttgagtagaatgatcgtcagcaccacgaacagacccagcgcgaggttggtgggtgcgccgaagtcgggtgcgttgaagccgccgccaaggtcagtgataccgaccttgatcaagctgatgccgatcagggtgatgacaattccggtcaccaggggcgtgatcacccggcgcagttgcccgataaaccggctcaacacgatctgtaccacggcgccgaaaaagcacacgccgaagatcatcgccatgatgtcttccgggctgccgccgcgttgtttcaccagaaagcccgccgacaacactgcgcccagaaacgcgaagctggtgccttgcaggcagatcatcccggcaccgataccaaatggcctgcgcgcctgaatgaaggtgccgacaccggagaccatcaacgccatgctgatcaggtaaggcaaatgggcggtgaggcccagggtggagccgatgatcagcggtggagtgatgatgccgacaaatgcagcgagtacatgttgcagtgcggcgagaaaggccggcgcgggtttcgggcggtcgttgaggccgtagataagatcgctgctgttggacgcttctggtggcatggcgggcaaactcaaggtctatgtccctgggttgttgcaaaaaactgtccaactgctcagcttttagctgcgaggccgagttagcgggttgctgcgaggctttccaggaagctttccagcaccaaatgggggcgccggcctttgcgcgtgaccgatgcgaggcttaaatcgtaaaaacgcgtagccggtttcagcgcacgcagtcggccttgttgtacccacaggctcgcgtagtggtcgggcaggtagccgatgtagcggccggtgaggatcaggaacgccatgccttcgcggtcggaggcgctggccgtgcagttgagcgcctggtaatgggcctggatctcggcgggcaggcggaaggtcggagcgatggcgtcctgggcatcgatgcgtgcatcgtcgagttgcttgttgtcggcgtagaacaaggggtggccgactgcgcagtagagcagtgagcgttcgctgtacagcggctggtattccaaccctgacagggcgctggcctgggggactacgccgacatgcaggcgaccgtcgagtacgccttgttcgacttcgttgggggcgatcatacggatctggatctgcacgtccggcccgcgctccttcagctgcgcaagtgcgtgggtgatgcgcatgtggggcagggtgaccagattatcggtaaggccgatgatcagctcgccgcgcaagtgctggtgcaggccattgacctcggtgcgaaagctttccagggcacttagcagttgcagggccgactggtagacctcgcggccctcttcggtcagggaaaaaccggcgcggccgcgttggcacagtcttaatccgaggcgttgctccaggtcgctcatttgctggctgatcgccgagcgcccgatacccagcacggtttccgccgcagaaaagccgccgcactccaccacgctgcgaaagatgcgcagcaggcggatatcgaagtcgctgacttgggccaggggatcgggtcgacggctgctcatagtttagtgaaggcctgactgaaggttagaagagttgaatttcaccgactttatcgccgtggcaatttagctgcaacaacgcttttcaatcccgacgctgccttttgccctgcgaggttttgctgatgaacatgcccgaaaacgccccatcgtccctggccagccaattgaagttggacgcgcactggatgccgtacaccgccaaccgtaacttccagcgtgacccgcgcctgatcgtggccgccgaaggaagctggttgaccgatgacaaaggccgcaaggtgtatgactcgttgtcgggcctgtggacctgtggtgccgggcatacgcgcaaggagattcaggaagcagtcgccaaacaactggggactctggactactcgccgggcttccaatacggtcatccattgtccttccaattggcggaaaagatcaccgacctgaccccaggcaacctgaaccatgtgttcttcaccgactctggctccgagtgcgccgatacggcggtgaagatggtgcgtgcgtactggcgcctgaagggccaggccaccaagaccaagatgattggccgcgcccgtggctatcacggtgtgaacattgccggtaccagcctgggtggcgtcaacggcaaccgtaagctgtttggccagggcttgatggacgttgaccatttgccgcacaccttgctggcgagcaatgccttctcccgtggcatgccggagcagggcggtattgcgctggcagacgaactgctcaagctgatcgaattgcacgatgcgtcgaacatcgccgcagtatttgtcgagccaatggccggctccgcgggtgtgctggtgccgccacagggttacctcaagcgtctgcgtgagatctgtgatcagcacaatatcctgctggtgttcgatgaagtgatcaccggtttcggccgtaccggctcgatgttcggtgccgacagcttcggcgtgaccccggacctgatgtgcatcgccaagcaagtcaccaacggcgcgatcccgatgggcgcggtgattgccagcagcgagatctaccagacattcatgaatcaggcgacgccggagtacgcggtggaattcccccacggctacacctactcggcgcacccggtggcctgcgcggctggcctggcggcattggacctgttgcagaaggaaaacctggtgcagagcgtcgctgaggttgccccgcaatttgagaacgcgctgcatggcttgaagggcagcaagaacgtgatcgacatccgcaactacggcctggccggcgcgatccagattgccccgcgtgacggtgatgccatcgtgcgtccattcgaggctggcatggccttgtggaaagccggtttctacgtgcgctttggcggtgacacgctgcagttcgggccaaccttcaatagcaagccgcaggacctagatcgcctgttcgatgcggtcggcgaagtgctgaacaagatcgactgatttctccttctatatagaacaactttttcaggagccccgcatgagccttatccagcatttgatcaacggtgagttggtcaatgattccggccgtagtgctgacgtgtacaacccgtcgaccggccaggtgattcatcaagtgccgttggccagccgtgaaaccatccaacaggcgatcgactccgccaaggcagcgttcccggcctggcgtaatactccgccagccaagcgtgcgcaggtgatgtttcgtttcaagcaattgctggaacagaacgaagcgcgtatctcgcaattgatcagcgaagagcatggcaagacgctggaagatgccgccggtgaattgaaacgcggtatcgagaacgtcgagtatgcgtgctctgcaccggagattctgaagggtgagtacagccgtaacgtaggaccgaacattgatgcctggtcagatttccagccgctgggcgtggtggccggtattacaccgttcaacttcccggcgatggtgccgctgtggatgtacccgctggcgatcgtttgcggtaactgtttcatcctgaaaccatcggagcgtgatccgagctcgacattgctgattgcacaactgctgcaggaagccgggttgcccaaaggcgtgctcagcgtggtgcacggcgacaagggcgcggtggatgcgctgatcgaggcgccggaagtgaaagcgctgagtttcgtgggttcgacgccgattgccgagtacatctattccgaagcgaccaagcgtggcaagcgcgtacaggcattgggtggagcgaagaaccacgcggtgctgatgccggatgcagatctggataacgccgtcagcgctctgatgggggcggcatacggttcctgcggcgagcgttgcatggcgatctcggtggcggtgtgcgtgggcgaccaggtggcggatgcgttgatcgccaagctggtgccgcaggtcaaggcgctgaagattggggcggggacttcttgtggcctggatatggggccgctggtgaccggtcaggcgcgggataaagtcagtggctatatagaagacggtgtctcagcgggcgccaagttggtggttgatgggcgtgggctgagtgttgcgggccatgaagaaggtttcttcctgggcggtagtctgtttgatcatgtgacgcctgaaatgcgtatctacaaagaggagatctttgggccggtgctatgtgttgtaagggtggatagcctggaagcggccatgcaactgatcaacgatcatgaatacggtaacggtacgtgtatcttcacccgtgacggtgaagcggcgcgtctgttctgtgacgagattgaagtgggtatggtgggggtgaacgttccattgccggtgccggtggcatatcacagctttggtggctggaagcgctcgctgtttggcgacctgcatgcctacgggccggatggggtgcgtttctatactcgtcgcaaggcgattacccagcgttggccgcaacgggccagccatgaagcctcgcagtttgctttccctagcttataagtagtgctgaaagccggccccttggggccggctttcgcgtttctggggcttttttgacccatgtgacagaaatatgaaaaaaggtgttgacggcagattctggaagtctataattcgccccacttccggcgcagtcgaaacggaaaactccttggtaaacaaagagttacgcagaattcgacagcgacttgcttcagttcatcg

SEQ ID NO: 129 - DNA, 432733 bp, Pseudomonas nodulensis; identical to SEQ ID NO: 99
  misc_feature (401720)..(401744): n is a, c, g, or t

SEQ ID NO: 130 - DNA, 78670 bp, Pseudomonas nodulensis; identical to SEQ ID NO: 24

SEQ ID NO: 131 - DNA, 270935 bp, Pseudomonas nodulensis; identical to SEQ ID NO: 101
  misc_feature (88511)..(88562): n is a, c, g, or t
  misc_feature (230679)..(230714): n is a, c, g, or t

SEQ ID NO: 132 - DNA, 113317 bp, Pseudomonas nodulensis; identical to SEQ ID NO: 26

SEQ ID NO: 133 - DNA, 379786 bp, Pseudomonas nodulensis
  misc_feature (14563)..(14597): n is a, c, g, or t
  misc_feature (348758)..(348784): n is a, c, g, or t
tatgtttgccgagatcgatcccgatcagtgctgactcgctcatgatgatggcctccgaaaacaaaacaccctgtgaaagcgtagccctcacagggtgttgggggtgaccatctcattaacccggccaccagggccgggtttgaaagagcgtgggcgcttcagccttgctgggcaggcttgaccagtcgctgttccagttcgctgcacgcttgctggatcatctcttcggtgatctgcacttcgcggccttgggcgtcaatgtacgagcaaggcaactgctgcggctggcggatcacttcaatcttggcatcgctgctgttctgcaaggtcatggcctgtctcctcatcaggttgtgtacctactctaaagcccgcgcgtgaccaggctgttacaactccctgccaggtcagcggttcgaacactcagtccaccagaaaccaatacaaatttccagccaggggttagaccgatagcctctagggatcagcatcggcgggcataattaacctgactcattgctattcgcccaagttccccccatgtaggtgtacagacttctcattggtgatgctctccatgttctcagtccgtcaacgccgtgccattcgcctggccagtcgattcatcgcgccttaccgctggcaggcgcttggcgccctgttggcgctgatcgtcacggccggcatcaccttgtccatggggcagggcatccgcctgctggtggaccaggggttcatgacccagtcgccgcacttgctcaaccagtccatcgggctgttcatgatcctggtgctgggcctggctgtcggcacctttgcgcggttctacctggtgtcgtggatcggcgagcgggtggtcgcggatatccgccggcaggtgttcaatcacctgatctacctgcatccgggcttttatgagaacaatcgcagttcggaaatccagtcacgcttgaccactgacactacgctgctgcaatcggtgatcggttcgtcgctgtcgttgttcctgcgcaatgccttgatggtcatcggtggcatcgtgctgctgttcgtcaccaatcccaagctcaccagcatcgtggtggtggcgctgccgctggtgctggcgccgatcctgatcttcggccggcgcgtgcgcagcttgtcgcgccagagccaggaccgcatcgccgatgtgggcagctatgtgtcagaaaccctcggccagatcaagaccgtgcaggcctacaaccaccaggtgcaggacgaacagcgcttcgccgtcaccgtggaagatgccttcaccaccgcacgcaagcgcatcacccagcgtgcgtggctgattaccctggtgatcatgctggtgctcggcgccgtgggcgtgatgctgtgggtcggcggcatggacgtgatcagtgggcgtatttccggcggcgagctggcggcgtttgtgttctacagcctgattgtcggcagtgcggtcggcaccctcagcgaggtgcttggcgagctgcaacgtgccgccggtgccgccgagcgcattggcgagttgttgcagtcgagcaacgagatccaggcgccggtcgccggcactgtccagttgccggcgcgggtcagcgggcgcatggagctgcaggacctgcgcttttcctatccttcacggccggacagctatgccatcgacggcctgaacctgaccatcaaccctggcgaaaccctggcgttggtcggcccttccggtgcgggcaaatcgacgatcttcgacttgctgctgcgcttctacgacccccagcaaggccggatcctcattgaaggccacccgctgaccgaactcgaccccatggacctgcgccgccacttcgccctagtgtcccagagcccggcgctgttctatggcagcgttgaagagaacatccgctacggcaacccggcggccacccaggaacaggtcgaagcagcggcgcgcattgcccacgcccacgatttcatcctgcaaatgcccgacggttaccagacccacctgggcgacggcggcatgggcctctctggtggacaacgccagcgcttggccatcgcacgggcgttgctggtggacgcgccgatcctgctgctggacgaagccaccagcgccctggatgcgcagagtgaacacctgatccagcaagcgctgccgcaattgatgcaggggcgcactacgctggtgatcgcccatcgactggccacggtgaagaacgccgaccggattgccgtgatggaccagggcaagctggtggcggtggggacacatcagcagttgattgcgagcaatgcgttgtatgcaaggttggcggcgttgcagttcagtgacggggccgaggtcggaaaaagcgaacgttaacgcggcctatgtggtgaacaagcttgttgtggcgagcgggcttgccccgcgttgggctgcgtagcagccccaaaacgtcacactgcttggcctggattgggagcgcttcgcactccaacgcggggcaagcccgctcgccacaaatgccagcttggccctcaggcaatgaactcactgatcatcaaaataccgctcatgccaatccaccaacggctgcggtgaattgagcttctgcccgtagatcaccgaataagacagcacgttctgcacatactggcgggtttcgtcgaacggaatgctctctacccacacatcgaagctcaggtggtcggcgccgcgcagccactggcgtacacgaccggggccggcgttgtaggcggcggaggcgagtacgcggttgccgttgaactggctgtgcacttggctcaggtaggcggcgccgagctggatgtttttgtccgggtccagcacctgggccggggaggccagggggatgctgaacttgcgtgcggtttccttggcggtgccgggcatcagttgcatcaggccgctggcgccgacgccggagcgggcgtcgtccatgaaggcgctttcctggcgggtgatcgcgaacacccagctcgaatgcaggccgcgcaccttggcttcacgcaccagggtatcgcggtgggccatcgggaaacggatgtccaggtcgtcccagtactgcgcctggctgatggtgcggatggctgggaagtaccacttcatgtcgtaggccagcttggcctgggcgaccatttcgtcgcggttgaagtgacggctgacgtggtaccactcacgacggccatccaccacctggccgcgtgcatagaactccagggcgcggcgcacgcccggggtattgcgcactttgttgaccagcgcctggctcatcagcaggggtttgttcttcaactggtacggggccttggagcgatcggcggcaaggaaaccgtagaagtcacgctcctgcgccaggtgcttgtacaagaccagcgcttgcgggttcttcggctcggccagttccaggctgcgggcctgccagtagcgccagcggttggtggtggccaggtcttgtggcagtttgcgggtcaactggtaggcatcttcccagcgggccaggcgcagcagcaggcgcaggcgccactcggacacggtgttgtcgcgcaactcgggatcgtacttggtcatcacctcaagggcgcgcgggtcatagcgcttggccagggtgaggccgatttcccgggcgatcgacactttttcgtcacgggagaagtgcatgctgctggcgtagccgtcgagcagggccatggccttgtccggatcctggcgtgccaggcggcgcaggcccaggcctacggcgtcggacatggcctcggtggccggcaggaagcgcgaggggtcgctgagcatgtccggcttttgcgccacgtccaccatcaggcggccttgcgggcccagcgtgcgcagggtttttaccaggctgttggccagcgcgtagttgcgcgcttcggcggcgagtttggcgcggtcccagatcttctgttcggtgagttggccgtcagccgcccattggccaaaggtgacatcgcaggcagccggttgggacttgcctgtcatccagagtttttcggcggtcttgtagccctcggccttcagattatgggtgagctggtactggccgtgcaggcagtccagttcgacgaaattgagcttggcatcgtagtacttttcaaaggtctgccagtcgccgcgttcggccagccagcgcaaccagcgcagtttcatccagttggcctggggcaggtcgccgtttttggcgaggaactgctcgatttcctggttgctcgcggttttcaggcgggcggtcagttcgtcgtaggccagatagggtgtcaacgggtagtcggccagggcctggctgtattgcatgtacggcccggtatcgcccttggccagggcgcgtttggcttcatcgtagtattgacgttgggtggtgaggtccacggcctgggcggattgaacggcggtggcggaaagaagcagacaagataaaaagctgaaaaggcgactgcgcatgagacgtccgtgcagaggaatctggacaagtgccggcatcgccgacactgattgcccctagcttagccttttgcctgacgccggtgaaagctttgacggccgcttcgttcaagttcctcggaaatgtctctcagagtatgtcgactgagaaaatcccggccgcctcagcccctaactcaggtagaatgcgcgcccagtttttggagaagcgtatgaccctgctcaaattcagcgatgtgtcccttgctttcggcgccatgccgttgttggacaaggtgtcctggcagatcgcccgtggtgagcgggtgtgcatcatcggccgcaacggcaccggcaaatccagcatgatgaagctggtcaagggcgaccagaagcccgatgacggctccgtatggcgcgcgccgggcctcaagatcggcgaattgccgcaagaattgccggtggccgacggacggacagtgttcgacgtggttgccgaaggcctcgacggcgttggcgcactgctcgccgaataccatcacctggcacagaactgtgtcaccgaagatgacctgaacaagctgatgcacgtccagcaagacctggaagctcgtgatggctggcgcttgcagcaattggtcgacagcaccctgagtcgcctgcaactgccggcggacaagaccctcgccgagttgtccggcggctggcgtcgtcgcgtgctgctggcccaggccctggtgtccgagcctgatttgctgctgctcgacgaaccgaccaaccacctggacatcggcgcgattgcctggctggaagaagcccttaaggaattccagggcgccgtgctgttcatcacgcacgaccgttccttcctgcagaacctggcaacgcgcatcctggaactggatcgtggtggcttgatcgactggaacggcgactacgccagttttctggtgcacaaggaagccgcgctggccgccgaagaaaccgccaacgcgctgttcgacaagaagctggcccaggaagaagtctggatccgccagggtatcaaggcccgtcgcacccgtaacgaaggccgcgtacgcgccctgaaagccctgcgtgttgagcgcagcgagcgtcgcgagcgtaccggcaaggcgaatatccagctggacaccgccgacaagtcgggcaaacaggtgatggtgctggagaacgtcagcttccatcacccggatggcccgttcttgatcaaggacttttccatggtcctgcagcgcggcgaccgtatcggcctgctgggcgccaacggtactggcaagaccaccttgctcaagctgatgctcaacggcttgcagccgaccagcggtaaagtggaggagggcacgcggatcgacgtggcctacttcgaccagttgcgccatcagttggacctggaaaagaccgtaatcgacaacgtcgctgaaggccgcgactttatcgatatcgacggccagagccgtcacgtgctcagctacttgggcgacttcctgttcagcccgcagcgtgcgcgtaccccggtgaaagccttgtccggtggtgagcgtgcgcgcctgctgctggccaaactgttcagcaagccggccaacctgctggtcctcgacgaaccgaccaacgacctcgacgtggaaaccctcgagctgttggaagaagtgctgctgaccttcaacggcaccgtgctgatggtaagccacgaccgggcattcctcgacaacgtggtcaccagcaccttggtcttcgaaggtgagggcaaggtgcgtgaatacgtgggtggttaccaggactggttgcgccagggcggttccccgcgtttgctgggcgtgaccgagagcaagtccggcaaggccgacttgacctccgccgtggtggctccggtggttgctgctgcaccggcgcaggacgccgcgccggcggccaagaagaaactcagctacaagctgcagcgggagctggaggccttgccgggtgatatcgacgccaaggaacagcagattgccgcggtagaagcgcaaatggctgacgcggggttctacctgcgtccggcggcggaaacggccaaggtcatcgcttccctggagaaactgaaccaggagctggaagtgttggttgagcgttgggctgagttggatgcctgagtgatctcagcgcattaaaaaagcccggcgttcattcgtatgaacgccgggctttttatatcggtcttaaggggcttttaccagcttgacggccagcacatcgcacggcgcgccatgcaggacgtcattggcggtggatcccagcaacagcgccaaaccatgacggccatggctaccgaccacgatcaggtcacaacccttttctttggccaggtggtggatttcctggcgcggttggccgtaggtcaggtggcagtcttcctttttcaggtgcgggtacttgagaatcaaacggtccagacgctctttggcctggtcgaattgttgttgctgcaactgggaaaggtccatcggcacgtcaccgccaaaggccatggccatgggctcgacgatgtgcaccagtgacagtacggcaccattggccaatgcagattcctgcgcgcgcttgatcactggatcgcactcttcggtcagatcgacagcgaccagaatatgttggtagggcatgaggcgttcctccagggggactgcaatagattcagtatggctgctttcaagcggatagggttgcgtcagatcaaatccgctcatctgtaaattcgggagtacacatatgacggtctggatagtggtgtcaatccttgtggtggtgctcagccccctggcatggctgcgcccgtcgcgccaccagagcggacgcatggccctgcgcatggaggcgcgccgcatcggcctggccatgcaactggcgccccaggagtggccgccctggctcaagcaggagccgccgagcccttgcgcgcagtactgccggccacggcgcggcagtacgccggcgatctggtgttattggcagttggagccaagtgtgtgggtcaatcagtggcgtgaagtgtgcgtcgatgaaaagttgttgccgcattttgcgacgctgccggacaacgtctacaagatcgaagccgacaagcagatgatcgccctgtattggggcgagaagggcgaggcgagcgtgttgaaggatatcgatgcgctgctcaaggcgttggcctgaattgcaggcaataaaaagcccgacaatcatcatcgggctggagttggccaggcaggccggtaaatctttggttgcggctagcctagccgcatatcccattctgtacagccttttcccacatcttttctattattgatttcgtgaatatttgaatattggcgaggcgcacgtatgagggcggggttctgaactgactggaaagtcgcgtttttcctagcctttggagcgattgacaattgcccggaattggatgaaggtggcgtacccaaatcaaacgggcgtatgaattgagcgtttgtctgtcagacgactcatacagaatcccgactatcgcattggcgggtgtgcctggcggattggcgtgaacattgaagatttcatcaatgtccaacccataggccagcgtccaatgtgtactgttcagcttccatatcgtggagatcagttgatgatttacgaaggtaaagccatcacggttaaggctcttgaaagtggcatcgtcgaactgaaattcgacctcaagggtgagtccgtcaacaagttcaaccgtctaaccctgaatgaattgcgtcaggccgtagacaccatcaaagcagatgcttcggtcaagggcgtgatcgtctccagtggcaaggacgtgttcatcgtcggcgctgacatcaccgaattcgtcgacaacttcaagctgcccgatgccgagctggtggctggcaacctcgaagccaacaagattttcagcgatttcgaagacctcaacttaccgaccgtggctgccatcaacggcatcgcgttgggcggcggcctggaaatgtgcctggcggcggacttccgcgtcatgtcggccaccgccaagatcggcctgcctgaagtcaagctgggcatctatccaggttttggcggcaccgtgcgtttgccgcgcctgatcggtgccgacaacgccatcgagtggattgccgccggcaaggaaaacaaagccgaagacgccctgaaagtcggtgccgtcgacgctgtagttgccccggacaaactggccgaagccgcactgaacctgatcaagggcgccatcagtggcgaatttgactacaaggccaagcgtcagccgaagctggaaaaactcaagctcaacgccatcgaacaaatgatgtcgttcgaaaccgccaaaggtttcgtggctggccaggccggcccgaactacccggcgccggttgaagcgatcaagaccatccagaaagccgcgaacttcggtcgcgacaaagctctggaagtggaagcggctggcttcgtcaaactggcgaaaacctccgctgcgcagagcctgatcggcctgttcctgaacgatcaggagctgaagaaaaaggccaaggcctatgacgaaatcgcccgcgacgtgaaacaggctgccgtactgggcgccggtatcatgggcggcggtatcgcctatcagtcggcgtccaaaggcacgccgatcttgatgaaagacatcaacgagcacggcatcgagcagggtctggccgaagccgcgaaactgctggtgggccgcgttgataaaggccgtatgaccgcagcgaaaatggctgaagtgcttaacggcattcgtcctacgctgtcctacggcgatttcggccatgtcgacctggtggtcgaagcggtggtcgagaacccgaaggtcaagcaagcggtcttggctgaagtggaagcccaggtcaaagacgacactatcctggcgtccaacacctcgaccatttccatctcgctgctggccaaggccctcaagcgtccggaaaacttcgtcggcatgcacttcttcaacccggtgcacatgatgccgctggtggaagtcatccgtggcgagaagtccagcgagctggcggttgccaccaccgttgcctacgccaagaaaatgggcaagaacccgatcgtggtcaatgactgcccgggcttcctggtcaaccgcgtgctgttcccgtacttcggcggtttcgccaagttggtcagcgcgggtgtggactttgtgcgcatcgacaaggtcatggaaaaattcggctggccgatgggcccggcgtatctgatggacgtggtcggcatcgacacgggtcaccatggtcgcgacgtaatggctgaaggcttcccggaccgcatgaaagacgaccgccgctcggcgatcgacgcgctgtacgaggccaagcgcctgggccagaagaacggcaagggcttctacgcctacgaggcggacaagaagggcaagcagaagaaagtcgccgacccgtcggtgcacgaagtgctggctccggtcatctacgagcagcgtgaggtgtccgacgaggacatcatcaactggatgatgatcgccctgtgcctggaaaccgtgcgctgcctggaagacggcatcgttgaaaccgccgccgaagccgatatgggcctggtgtacggtattggtttccctccattccgtggtggtgcactgcgttacatcgattcgatcggtgtggctgagttcgttgccctggctgacaaatacgctgatctgggcccgctgtaccacccgaccgcgaagctgcgtgaaatggccaagaacggccagagcttcttcggttaagcgcccagacgactagagcgagaatatttatgagcttgaatccaagagacgtggtgattgtcgacttcggtcgcacaccgatgggccgctccaagggcggcatgcaccgcaacacccgtgccgaagacatgtcggcgcacctgatcagcaagctgctggaacgcaacgtcaaggtcgacccgaacgaagtcgaggacgtgatctggggttgcgtcaaccagaccctggaacagggctggaacatcgcgcgcatggcctccttgatgacccagatcccgcacaccgctgccggccagaccgtcagccgcctgtgcggttcgtcgatgagcgcgctgcacaccgccgcccaggcgatcatgaccggtaacggtgatgtgttcgtggtcggtggcgtggagcacatgggccacgtcagcatgatgcacggcgtcgaccctaacccgcacatgtcgctgtacgcggcaaaagcctcgggcatgatgggcctgaccgcggaaatgctcggcaaaatgcacggcattacccgtgaagcccaggacgcgttcggcctgcgttcccaccagttggctcacaaggcgaccgtggaaggcaagttcaaggatgaaatcatcccgatgaacggctacgacgagaacggtttcctgaaactgttcgactacgacgaaaccattcgtccggacaccaccctggaaagcctggcggcgctcaagcctgctttcaatccaaagggcggcaccgtgacagccggtacgtcgtcgcaaatcaccgacggtgcctcgtgcatgatcgtgatgtcggcgcagcgtgcccaggacctgggtatccagccgctggccgtgattcgttcgatggcagtggcgggtgtggacccggcgatcatgggctatggtccagtaccggccacacaaaaagccttgaagcgcgcgggcttgaccatcaacgacatcgacttcttcgagctcaacgaagctttcgccgcacaggccctgccggtgctgaaagatttgaaagtactcgacaagatgaatgagaaggttaacctgcacggcggcgcgattgccctgggccacccattcggttgctccggtgcgcggatttctggcactttgcttaacgtgatgaagcaaaatggcggcaaccttggggttgcaaccatgtgcattggtctcggccaaggcatttccaccgtcttcgaacgcgtttaagcgttgggttgacggaagccggggcccagtgccccggtttttgttttttggaatttttaatattttttttcaacaaattttgtaagagggccagagcatgaaagtcgaaccagggctctaccagcattataaaggtccgcagtaccgtgttttcagtgtggcgcggcactccgagaccgaagaagaagtggtgttctaccaagctctgtatggcgattacggcttttgggtacgcccgttgagcatgtttctggagactgtcgaagttgacggcgagcaggtcccgcgctttgctttggtccaggccgaacccagtcttttttcagggcaataacggcaggtcgcgcagactgctgcgcttgacctcaccttgttgccactatatatagcgttgccgcgacaggcgccaactgcctttcacttctcgaattcaggaattttccgatccatgggcaaatcgctggtcattgtggaatccccggctaaggccaagaccatcaacaagtacttgggcaacgagtacgtggtgaagtcgagtatcggccatatccgagacctgcccaccagcggttcggctagcgccagcaaggagccagccgccaagcgcggcaaggcggctgcgggcgaaggtccggtgctcacccctaaagagaaagcgcgcaagcagctggtctcgcgtatgggggtggacccggatcatggctggaaggccaagtatgaaatccttcccggcaaggaaaaggtcatcgaggagctgcgccggctcgccaaagatgctgacaccatctatctcgcaacggacttggaccgcgaaggggaagccattgcctggcacctgcgagaagccatcggcggtgatgacagccgctacaagcgcgtggtgttcaacgaaatcaccaagaaagccatccaggaagccttctccaagccaggcgaactggacatcgaccgcgtcaacgcccagcaggcgcgtcgcttcctcgaccgcgtggtgggttacatggtatcgccgctgctgtgggcgaagatcgcccgtggtctgtcggccggccgagtgcaatcggttgcggtgaagctggtggtggagcgcgagcgcgagatccgtgcgtttatccctgaagagtactgggaagtccacgctgacctcggcaccgccaagggcgccaatgtgcgctttgaagtggcccgtgagaaaggcgaggccttcaagccgttgaacgaagcccaggccatggccgcgctggaaaagctcaaggcttccagctacagcatcgtcaagcgtgaagacaaaccgaccagcagcaagccgtcggcgccgttcatcacctccaccctgcaacaggccgcgagcaaccgcctgggcttcggtgtgaagaagaccatgatgatggcccagcgcttgtatgaagcgggctacatcacgtatatgcgtaccgactccaccaacctgtcggtggacgcggtcgccatggcgcgtacctatatcgaaagcgaattcggcaagaagtacctgccggagaagccgaacgtctacagcagcaaggaaggcgcacaagaggctcacgaagcgattcgtccttccgacgccaacaccacgcctgccaagctcagtggcatggaacgcgacgctgagcgcctctacgagctgatctggcgccagttcctggcctgccagatgctgccggcgcaatacctgtccactaccgtgagcgtgggcgctggcgacttcgagctgcgtgccaagggccgtatcctcaagtttgatggctacacccgcgtgatgccgcagatcgccaagccgggcgatgatgacgtgctgccggacatggcccagggcgatacgctgaagctgatcaagctcgacccgtcccagcatttcaccaaaccgccggcgcgctactccgaggccagcctggtaaaagagatggaaaaacgtggtatcggtcgtccttcgacctacgcggcgatcatctccaccattcaagaccgtggctacgtggcgctgcacaaccgtcgtttctattcggaaaagatgggcgatatcgtcaccgagcgtctgtccgagagcttctccaacctgatggactacggcttcaccgccggtatggaagagaacctcgatgacgtggcccagggcgagcgcgactggaaaaacgtgctggacgagttctacggcgacttcaagaagaagctcgaggtggccgaaagccctgagagtggcatgcgtgccaaccagccggtgatgaccgatattccgtgccagacctgtggccgcccaatgcagattcgtactgcatccaccggcgtgttcctcggttgttcgggttacagcctgccgccgaaagagcgctgcaaggccaccgtcaacctggtgccgggcgacgaaatcgccgccgatgacgagggcgagtccgagtcgctggtactgcgtggcaagcaccgctgcccgatctgcagcacggcgatggacgcctacctgttggacgagaagcacaagctgcacatctgcggtaacaacccggattgcaacggctacgagatcgaggaaggcacttatcgcatcaagggctacgaaggtccgagcctggagtgtgacaagtgtggcagcgagatgcagctcaagactggccgttttggcaagttcttcggttgcaccaacccgacctgcaagaacacccgcaagctgctgaaaagcggtgatgcggcgccgccgaagatggacccggtgaagatgccggagctcaagtgcgagaaggtcaacgacacctacatcctgcgtgacggggcttcggggttgttcctggctgcgagccagttcccgaaaaaccgtgagacccgtgcaccgctggtgctggagatcgtgccgcacaaggatgagatcgatccgaagtaccacttcctgtgtgaagcaccgaagaaggatccggatggtcgcccggccgttatccgctacagccgcaagaccaaggagcagtatgtgcagtccgaagtggacggcaagccgaccggttggaaagcgttctacgacggtggcaagtggaaggtcgaagacaagcgtcagggcgcttgatccggcggatgcgctgaagatccaatgtgggagggggcttgcccccgatagcnnnnnnnnnnnnnnnnnnnnnnnnnnnnnnnnnnngctatcgggggcaagccccctcccacatttgggtctgtttggttctttaggcccgcataggcagcggtttattgcacttgcagtaggttcggctgatccgtgaaactgttcagccagcatcacgcttattcgttgtggagattgccgtcatggcctacgaactctatacccgtaccaatcagaaaatttacttcgcgggtttgtccctggaagcccttggccgtgccgaggaagggaaggagatgaatgccatcgcgctggtccaggcggggcgtgaagcggcgttgttccacctgtacggcgccttgctgggcctgtgccacgaaatcgccggcttttaccgtctgccccaggccggctcgccccgtgctgaaatgatcatgaatcgcgaagtgctcgattcgatggcgattcctgaattggccgagctggtggaaatggcgcaaagccccgacagttgggttgcacgcctactcaaggcgcatgccgatatgttccaaccgccgcgcattccccatgtgcccaagggggatgtgactcagccgctgattgtggcggttgcggtggaagaggaagaacccaagccgttgagccgcgaagagctggaaggctggcgccaggaattgaaaaaaatggcgttgcgctttcgcgaaggcctcaacgagtgctgatcattctgtaggaattggatagcgaccattcatcaagctgtcaagaaacctgttcagatcctctgcgaggctgggtggatgactgatataatcccggcctttcgtggagaacagacttttatgccgacgtcctttctggaaattgttgagttgcctgacggccgaatcgagctgcgccgggctgaggacgaaggttctctggtcattctggatttttccgaggacgccaaggtgttcctgcagggccaacacgtggaagtggctaaagccatgttgagcgtgggtgtgcagatggcaggtcgcctggcagaaggcgaaccggagaaagaagacgggccgcgggttcttcactgagttctgtggtgaaggagtctggggtggttagacaggcttctgtggtgagctagcttgcttgtagtgagtggacttgttgtggtgagcgggcttgccccgcgcagggctgcgcagcagccctaaatagattgacgcagtacatcaggtattccacggtgcttggttttggggccgcttcgcagcccagcgcggggcaagcccgctcaccacagaagcccgcatgtcacaggacttcggtcgatcagcactagcccaatcgaatattcaaactctgcgcatcacccgtacgagcagcgctgatcaactgctgcttggcgctgacactcagtggattcaaccagctcaccactgtatggctgcggcccaggcgaagtgcttcgcaggtcaactgttgggcactttgcgcgccgcgtggttgcagcagcaggatgcgctcgcgattgaggccggcgtcccgtagccaggcctgggtcaggctggcgggcggggcgatcagtgtcagccagcgggcgtcctgctcttcgctcaactcgcgcaggatgggcgccagcaggctcaggcagctccctgctgcaccgcgcaacgacaattcactgaacgcctcaggctcggcgctccagggcgcttcgatcgtttccttgaggatgggcgcaaggggttgggccatgaaggcctcgaacagcgacagttgtgtgtgttgtggggtgtggacgagctgcatgatgcctcctttagcggcgaatgacgccgacgctcaggccttcgatcaccaggtcctggtctttcaggttcacttcaatcggggcgaactcagggttctcggccaggagccaaaccttactgccttcgcgcttgaagcgtttgacggtgacttcatcgcctatacgggcgacgacgatctggccattacgggcttcgcgggtggtgtggacggccagcaggtcgccgtcgaagatgcccacgtccttcatgctcatgccatggacccgcaacaggtagtcggcgcgagggtggaagaaggtagggttgatgttgcaggactcctcgacgtgctgctgcgccaggatcggcgcaccggcggcgacgcggccgatgatcggcagggtcgattcgtcggccttggcctcgaagccagggatgcgaataccgcgtgaggcaccgggggtcatctcgatcgcgcctttgcgagcgagggccttgaggtgttcctcggcggcgttgggggacttgaaccccagttccagcgcaatctctgctcgtgtcggcgggtagccgttgtcatcgaggcagcgcttgataaaagccagaatctcagcttggcgtggcgtcagttttagcatgttgatcgctctgtctttttatacagtgactgggattatatacagtgaactgcgcttggcaatcatccttttccagccctccgctggacggtcatccctgaggcttcccacaggcccgagatagcgctgcctacagatcaatagagatgtgattaaatagcgatgaaatacatgactgcccggccggaaagcgaactcgcaggcttgacaagacacaccctgaaacgtatgtttcaaacaagtgtttgtcaggcggagtagccatggcccagtcggaaaccgttgaacgcattctcgatgctgccgagcaattgttcgcggaaaaaggatttgctgaaacttcattgcggctgatcaccagcaaggctggcgtcaacctcgctgcagtgaactatcacttcggctcgaaaaaggccctgatccaggcggtgttttcgcgtttcctggggccgttctgcgccagtctcgaccgtgagctcgagcgtcgccagggcaaggctgaccacaagccgacactcgaagagctgctggaaatcctcgttgagcaagcgctggtggttcaaccgcgcagcggcaacgacctgtccatcttcatgcgcctgctcggcctggcgttcagccagagccagggtcacctgcggcgttacctggaagacatgtacgggaaggtatttcgtcgctatatgttgctggtcaacgaggctgccccgcgtattccgcccatcgagctgttctggcgcgtgcacttcatgctcggtgcggcggcgttcagcatgtccgggatcaaggcgctgcgggccattgccgagaccgatttcggcgtcaacacctctattgagcaggtgatgcgcctgatggtgccattcctggctgccggcatgcgtgccgaaaccggtgtgaccgacccgacgatggcggccgcccaattgcgcccgcgcagcaaatccgcgccaacccccgccaaggtttgaccctgccgggtgtgcgcagccgcttgcatccgctaagctagcggcccatgccgaattcagctatttactcgcaacctgttgtgctcactgtgcctggtgggtgcaatgggttgtgcgcgttatataaggaagatttatgactgctgccctgcaaggttcattgatggtcgacgttgccggcacttggctcacggccgaggaccgccatctgctgcgccagcctgaggtgggcggcctgatcatttttgcacgcaacatcgagcacccgcgccaggtgcgcgagttgagtgcggcgattcgtgcagtgcgcccggacctgctactggcggtcgaccaggaaggcggccgcgtacaacgcctgcgtcagggctttgtgcgcctgccggccatgcgtgccttggcggataacccgaatgcggaatacctggccgagcagtgcggctggatcatggccaccgaagtactggccgtgggtctggacctgagcttcgccccagtgctggacctggattaccagcgcagcgctgtggtcggcacccgttccttcgagggcgaaccggagcgcgccgccgtgctggcgggtgcattcatccgtggcatgaacagcgccggtatggccgccaccggtaagcacttccccggtcacggttgggccgaggccgattcccatgtcgccattcccaatgatgagcgtagcctggaacagattcgcgccaatgacttggtgcctttcgcacgcctgagtcagcaactggcggctgtcatgcccgcgcacgtcatctacccgcaagtcgacacccagccagccggcttctcgcgccgctggttgcaagacatcctgcgcggtgagttgcagttcgatggggtgattttcagcgatgacctgtccatggcaggtgcccatgtggtgggcgatgccgccagccgcatcgaagcggcgctgacagctggttgcgacatgggactggtctgcaacgatcgcgcagctgccgaattggcgttgagcgccgcccagcggatgaacgtcaagccttcggcgcgcatcgcacgcatgcgcggccagacggtcgcctcgactgagtacaaacaggatccgcgttggttggcggcgctgactgcgttgcgggatgctcagctgattgagtgaagaccgcgtcgcgcccatcgggggcaagccccctcccacattttgatctgtgaacctggtcaagtgtgggagggggcttgcccccgatggcgatgttaccgtcaacgcttctcttgcttatgcggcaacggcgcaaacagcgcttcgatatcctcgttgcccaattgccaatccccggtcgtacggccatccagcacacctgccgccaggtcggacttttccttttgcaggtgctggattttctcctccaccgtgccgcgggcaatcatcttgtagacaaacaccggcttctcttgaccgatgcgatacgcacggtcagtcgcctggttctccgtcgccgggttccaccaggggtcatagtggatcaccgtgtcggcttcggtcaggttcaagcccacaccaccggccttcaggctgatcaggaaaatctgcagcttgccgctctggaagtccttcaccggcgtgcgccgatcccgcgtctggccggtcaacaaggcgtaggcaacaccgcgctgtttcagctcggcttcgatcaggctcaacatcgaggtgaactgggaaaacagcaggatccgtcgaccttcctcaaataactcctcaagcatttccatcaagctatcgagcttgcctgaactgctgccacgggcgggcagggtggcgtcgttgaccaggcgcaagtcgcagcacacctggcgcaacttcagcagcgcctcaagaatgatgatctggctgcgtgccacgcccttgcgggtgatctcgtcgcgcaccttcttgtccatggccaggcgcatggtttcgtacacgtcgcgctgggcctcgttgaggtcgacccaatggatgatctcggtcttgggcggcagctccgtagccacttgttccttggtgcggcgcagcaggaagggtttgatccggccgttgaggtgctgcagtcgtacgtcgctggcgcgcttttcgatgggtacgcggtagtcgcggttgaagctttttacgtcacccagccagcccggcagcaggaagtggaacaacgaccacagctcacccaggtggttttccagcggcgtaccgctcaggcacaggcgctgccgcgcattcagttcgcgtgccgcctgggccgccttgctggacgggtttttgatgtactgggcttcatcgaggatcagcacatgcaggggcagcgccttgagctgttcgatgtccttgggcagcaaggcgtaggtggtcagcagcaggtcgtagtcctgcaggttcgcaaaatgtttcttgcgagctgcgccgtacagcgccaacaccttgagttgcggcgtgaagtgcgctgcttcatccagccaattggggatcagactggtgggcatcaccaccatacaggggcgatccaggcgcccggcgtttttttcgctgagaatatgcgccagggtctgtaaggtcttgcccagccccatgtcatccgcaagtatcccgcctacatcgagctggcgcagcgactgcatccaactcaagccttccagttggtacggacgcaaggtcgcgttcagcccttcgggcgccacgcaggtgaaatccttgatgtcccgcaggcgttgggcgaagttgcggattttttcgccaccttcccattgcagcggcaggtcttccagcgggttaaggcgaatcgcatcggccttggccaggcgcagcgtggtggcgccggcttcctgtagataaaactcaccgagggtggccagcaccggtttcagtcggccataaggcagcgccacttgtatcgggccgtggccattgggcaggccagggatattcaccaggatcagctcatcatcgcggcgccgcgccagtttctccgggttgaggatctcggtgtgggagcgcatcaggttcagcagaatcggcaacaggctcaggcgctcgccgttgacgatgatccccagctccaggtcgaaccagtcgcgctccggcccttcatcaaccgtggcataccagtcatcgacggcgctcaggtcgaagccgaaatcatcatcgatcagcagctcccagccctcggcccgcaaggtcggcgtggcattgagggtgaaggtcagccaggcactgtcattgaccatctcgaacaactcgccggcgctttccggcagggccttgctctggcgcgtggcgatcttgaaacccagcaggcgcagttgctcgcggtacggctgttccagctcgggatggcgcttgatgcgcaggctctgggtgtcctggcgcacgatgatgtcggcgtttttctgcccgctgacatagttgcccaaataattgaacgacagcgccgcccgatgctggatatagcgctgcatcttgccgttgcgtggttcgaacgcgctgaactcaacactggccatccacaggcgcggcaccggcaccacatcttccatgaccacctgcggcaacaccgcgcggttttccaggactgcctggagcttttccagcagctctgcatcctgggcggcagcggggaaggccagggtttcctggaccttgagcagtaccgccgcgatgtgtttgcagttggtgtgcaccgggcaagtgcagcggctgtccaccagaatcaacgtgcccttggccgattcgcgcagcgaaatggtctgccggtagacgttgccgcctgagccttcgcaactggcgatgatggtgctgtcgccggattcgacgatgcgcacccggttctccagggcataacgccgcccgcgctcaaggctctgctctttaaagcgattggcccacgaaggggccaggggtttggtcagcgacgacgtcaggggcatggcgttggatcagtcctggaggtcgggcggtggtgcgctgggtggcttggcggtcagcgaggtgattttgatcagcaacgccaggtggccgccgtccaggtagttgagctggttgttcttggtgcgcacgtcggtctggctcaggtgttcgctggcgatcacgctgccgttggcatcaaactggttgatccagaagttcgcgtcgatatcagtaaagcgccccagttgcaggttcagcacgccctcgatggggaactgcccgaactgctcctggccgtcggtgatggcgactttgacaggctgctcgcccaggttctgttcccaggccttatgcagcagcaccgtgtaggtggagtcggcgcgcagcttatcgacaatgttggacaggcgcggcgggctcagccgatcgcccaggcgcgcagcgccagcatcccagttttccggagcggcacggctgttgatcaccggttcggcgttctggcgcaccaggatcatttccacctggtacgggctgtcggcgaacgccgcaggtgccacgaccaccaacaacaggctcaacatgcggaacaggcgcattcgggcgtccttcaagcaggtttcgggatgaggcgctcgaacaacgcctccaaggtattaaagcgttcttcggcacgttccatcggcaccatgaacttgaacagcgtagccccttcgaacttgtagcggttgggctggccctggatcagcttgatcagcaccaacgggtccacgggggtctgcgcctcgaattcaatgcgcccaccctgcggcccggcgtcgaccttcttgatccccagttgctcggcctgcaatttgagcagggtcaggcgcaccaggttcttggtcggctccggcaacaggccgaagcggtcgatcatctccacctgcaggtccttgaggccttcttcgtcggtggccgaggcgatgcgcttgtacaggatcagccgtgcgtgcacatccggcaggtagtcctcgggaatcaacgccggcaagcgcaggttgatctccggaccgccgcccaatggttgatcgaggttcggttgctcgcccttgcggatggcttttaccgctcgctcgagcatctccatatacagcgtgaaacccaccgcctggatctgcccgctctggccatcgcccagcagttcgccggcgccacggatttccaggtcgttggtggccagtacaaaaccggcgcccaggtcctgggtgttggcgatcgcttccaggcgtttttccgcatcgccggtgatttgctggcgcggtggtgtcagcagataggcataggcctggtggtgactgcgcccgacgcggccgcgtaattggtgaagctgcgccaggccgaacttgtcggcgcgctcgatgatgatggtgttggcgctcggcacgtcgatgccagtctcgatgatggtcgaggcgatcagcacgttgaagcgcttgtggtagaagtcgctcatcacctgttcgagttcgcgctcgcgcatttgcccatggccgatggcgatacgcgcctccggcaccagctcggccaggtcggcggcgcatttttcgatggtcttcacgtcgttgtgcaggtaatacacctgcccgccgcgcagcagttcgcgcagcagtgcttccttgaccgtgctcttgttctgctccatcacgaaggtgcgcaccgacaaacgacgcgccggcggcgtggcgatgatcgacaggtcgcgcatgcccgacaccgccatgttcagcgtgcgcggaatcggcgtggcggtgagagtgaggatgtcgacttcgctgcgcagggccttgagctgttctttctggcgcacaccaaagcggtgttcttcgtcgatgatcaccaggcccaggttcttgatcttcacatcatccgacagcagcttgtgcgtgccgatcacgatgtcgatcttgccttcggccagatcggcgacggcggcgctcacttccttggccgacttgaagcggctcatcacttcgacagtcaccggccaatcggcaaagcggtcgcggaagctgttgtagtgctgttgggcgagcagggtggtgggcaccaggattgccacttgtttgccgccatgcaccgcaataaaggcggcgcgcatcgccacttcggtcttgccgaagcccacatcgccgcagaccaggcggtccatcggcttgggcgcgagcatgtcggcgcgcactgcttcgatggtggtttgctggtccggggtttcttcgaaggcgaagccggcgctgaaagtggcgtagtcggctttcgggtcggcgaacgcgtaaccctctcgggcggcgcgacgtgcatagatgtcgagcagctcggcggcgacgtcgcgcacctgttcggcggccttgcgcttggctttctgccaggtttcggagcccaggcgatgcaacggcgccagggcgtcgtcgctgccggtgtagcgggcgatcaggtgcaggctggctaccggcacatagagcttggcgccttcggcgtattccatggtgaggaattcggcggcctggttgtcgatctccagagtctgcaggcccaggtaacggccgacgccatggtcgatatgcaccaccggcgcgccttcacgcagctcggtcaggttcttgatcaccgcgtcgttgttggcgtcggcgcgtttttcacggcggcggcgctgcatcacgcgttggccgaacagcgggctttcggcaatcaatgccaacgctggatcgtccagcagcaggccttcgtccagtggtgcgatggtgatcgccaggcggtctttgctcgccacaaaatccggccagctgtcgacggtcttggggcgcagcttcaggcgttcgagcagttccagcagtacttcgcggcggccggcagactcggcggtaaacagcacgcggcctgggaagtcgccgaggaagttggacagcgcatccagcggttgcgtggctttggcctggatcgccaggtcgggcaacgtgcccgcggggaagcgttcgcgaccgacaccggtgtcgacctcctgctggctagcgaccacgcgcggccagtttttcaggcgtgcgaagcagtcttccaccggcaggaacagctcggcgggcggcaataaaggacgggatgggtcgacgcggcgttcttcataacggttacgcacgtcgttccagaagttttccgctgcttgctcgatacctggcagcgagaacacttgggtgtcctggggcaggtaatcaaacagggtggaggtttcgtcgaagaacagcggcaggtagtactcgataccggccggtgtaatcccgctgctcaggtcctggaagatcgggcagcggcggaagtccacgtcgaagcgttcacgaaagcgcgccttgaagcgggtgaccgcgtctttttgcagcgggaattcccgtgccggcagcagcttgatcgagtccactttgtcgatggagcgctggttctcggggtcgaaggtacgcagggtctcgatttcgtcatcgaacaggtcgatgcgatagggcagtttgctgcccatcgggaacaggtcgatcaacgcaccgcgcaccgcgaactcaccgtgctcgtacaccgtgtcgacgcaacggtagccgctggcttccaggcgcgtgcgcatctgttctacatcgagcttctggccgacatccagcaccaggctgctgcccagcaggaacttggtcggcgccaggcgatgcagtgccgttgttatcggcaccaccaacacgccgtgggccagttccggcaggcggtacagactggcgatgcgctgggagatgatgtcctggtgcggcgagaacaggtcgtagggcagggtttcccagtcggggaaatgcagcaccggcaaatcgggggcgaagaagctcagctcctgctccaaccgttcggcgctttggctgtcggcggtgagcagcagggtaaagcgcttggctgcgctggcagcctcggcgatagccaggctcagggcggcaccgggcaggttgccccagtgctgtttacctgcttcggcagggagtagcggtagacgcagaacgggcacggaaggttgagctccaagcgttgcgacaaagtcggtaattgtaacggcccgaggtgccgcctgtcagtttctgactgagcctattacggtttgtaggaaatgtggtggctaagacaaacaatggcgtgttttgactcaatatgtagtgccgaaatacgcgattgtttaggagggttacggacaagtcggccagttctcccaactggtggccttctggaacccgcgtatttactgggctgtagcggggcggtattttttggcaaggggtttttgttgtggggcgcgcattgctccgagggcggtcgggcggcataatgtagccccttttttcagcccctacatgtggaaggttcccgtgactcagaagcccgaccagtgtcttggtgaatggatcgaccgtgaagcactcgcagaagcgatgatcccgcttatcggtcagctgtaccgcaataacaatgtggtgagctcgatctatggccgcagcctgatcaaccagtccgtcatcgcgattctcaaagcgcaccgctttgcacgccatcgctctgccgacgacagcgaactctccgtccacgaaacattcccactgcttaaagccatgagcgagctcaagctcggcgcggcctcggtagacctgggcaagctggcctacaaattccgcaaggaaggcgccggccgtaccgccgagcagttcgtgcgtgaagaaatggccgatgtggttggccagcaaaacgccgcggcccgcaaaggcaccgacgtggtgctgtacggcttcggtcgcatcggccgcctgctggcgcgcatcctgatcgaaaaaaccggtggcggcgacggcctgcgcctgcgggccatcgtggtgcgcaaaggcgccgagaacgacctgaccaagcgtgccagcctgctgcgtcgcgattcggtacacggtccgttcaacggcaccatcgtcatcgacgaagaaaacaacaccatcaccgccaacggtaacctgatacaggtgatctacgcgaagaacccgtccgaggtggattacacccagtacggcatcaaggacgccctgctggtggacaacaccggtgtatggcgtgacgccgagggcctgggccagcacctggcctgcccgggcatcgaccgcgttgtgttgaccgcgcctggcaagggcaagctgaagaacatagttcacggcatcaaccacgctgaaatcaccgctgacgacaagatcgtgtccgccgcgtcctgcaccaccaacgccatcgtgccggtgctgaaggcggtgaatgacaagttcggcatcgtcaacggccacgttgaaaccgttcactcgtacaccaacgaccagaacctgatcgacaacttccacaagggcgatcgccgtggccgtagcgccgcgttgaacatggtgatcaccgagactggtgcggccaccgctgcagccaaggcattgcctgagctggccggcaagctgaccggtaacgcgatccgcgtgccgacgccaaacgtgtcgatggccatcctcaacctgaaccttgagaaagccgccacccgtgaagagatgaacgagtacctgcgctacatggcgttgcactcggatctgcacaagcagatcgacttcgtcaactcgcaggaagtggtctccaccgacttcgtgggctcgcgccacgccggtgtggtggacgccgaggcgaccattacccaggacaaccgcgttgtcctgtacgtgtggtacgacaacgagttcggctacagctgccaggtggttcgcgtgatggaagacatggctggggtcaacccgccagcgtttccgcgctaagcacccgcgttgaataaaaaagccccgactggttcggggtttttttgtgcctggggattttgtgctggctggaagggcctcatcgggggcaagccccctcccacatttaaactgcattcctgcagggttaatgcggtccagtgtgggagggggcttgccctcgatggcgtcagttcagacaatacatgtctttattccagcaacctctccgacaagcccttgggcgctaaccagatccccaggtaagccctcgccagctcatcgtcgttgctgctgaacagcacttccccattgatctccaggttcaagccgcgtccgggtcgaaaatccagtgcgtagcgatcaccgctatgaatgttgcgaaagacggcatgcagtttgtccacttcgggtttcaagcggtcgctgacgtgctggcgctccagcgtggtattggcggccttgatcacatcattgcgatcaatatcgcgaaagtaatacagctccaggcgcagcgtcttttgctgtttccaggctgactctgcgggagtgtcggctggggcatacagcgccgcggcgtatacatcggcccaaagataggtcagtactgcctggtttttcagtgccaattcatgagactgcggggggaaacctgcctgcttgagtcgggcgacttcattggcttgcaccgtgaacgaaaacatcagtaataaacagaaagcgacatgccgcataatggctcgtcctgcaaaggtgcgtgccgacagtgtaattgcaatttcctgagcgtgtagtagaggcaatactggcctacgacgcgaccaagggttaatgtgcgcggcgttgagccttatatagactgtgccccggttcacacacttgagccaaattgtccttcatgaccgctggcgcggcatgatttagcccggcgtccaaccgtacgcctggcctgttctgaggagtacgcatggctgtctacaactacgacgtggtggtactgggttccggcccggctggagaaggtgcggcgatgaacgctgccaaagctgggcgcaaggtggcgatggtcgatagccgtcgccaggtcggcggtaactgcacccacctgggtaccatcccgtccaaggcgttgcgtcactccgtgcgccagatcatgcaattcaacaccaacccgatgttccgggccattggtgagccacgctggttctcgttcccggacgtgctcaaaagcgccgagaaagtcatctccaagcaagtcgcctcgcgcaccggctactacgcccgtaaccgcgtcgacctgttcttcggcaccggcagctttgccgacgagcaaaccatcgaagtggtctgccccaacggcgtggtcgagaagctggtggccaagcacattatcatcgccaccggttcgcgcccgtatcgcccggcggacatcgatttccaccacccgcgcatctacgatagcgacaccatcctgagcctgggccacaccccgcgcaaactgatcatctacggcgccggcgtgatcggctgtgaatacgcatcgatcttcagcggcctgggcgtactggtggaactggtggacaaccgcgaccagttgctgagcttcctcgactcggaaatctcccaggcgttgagctaccacttcagcaacaacaacatcacggtgcgccacaacgaagagtacgagcgcgtcgaaggcctggacaacggcgtgatcctgcacctcaagtccggcaagaagatcaaggccgacgccttgctgtggtgcaacggccgtaccggcaacaccgacaagctgggcatggaaaacatcggggtcaaggtcaacagccgtggccagatcgaggtggacgagaactaccgcacctgcgtgccgaacatctacggcgccggtgacgtgatcggctggccaagcctggccagtgctgcgcatgaccagggccgttcggccgctggcagcatcgtcgacaatggcagctggcgttatgtgaacgacgtgccgaccgggatctacacgattcccgagatcagctcgatcggcaagaacgagcacgaactgaccaaggccaaggtgccttacgaagtgggcaaggcgttcttcaagagcatggcgcgtgcgcagatcgccggtgagccccaaggcatgctgaagatcctgttccaccgcgaaaccctggaagtcctcggcgtgcattgcttcggctatcaggcgtcggagatcgtgcacatcggccaggcgatcatgaaccagccgggcgagctcaataccctcaagtacttcgtcaacaccacgttcaactacccgaccatggccgaagcctatcgggtagcggcctacgacggcctcaaccggcttttttgagcggctccggccggtggcctgagccggccggggagaccgatttcagtaattcccgagggtggcagtggccaaaccgggaaagtctgtaatcaggctatctacgccgaagtcggcgagcctgcgcatcagcgcgggttcgttgactgtccacacggacacgtgcaagccctggcgctgggctttttccagtcgctcgggggtgcacagcgtccagttcaacgccagaatctcacagccatagttctgcgcgaccttcaacgggtcgagccaggcatattcggcaaccaggccgcgtgacaggtccggggtgagttcaaccgctgctttcagcacttcccgcgaacttgaggtgacggtgactttgtccatcaggccaaagcgcacggccatttcacgaatggccagcaccgtggtggcggcgcgggtgcgtgaggcgcttttgacttccagttgccagtgatcgaagtcgcattgttcgaacagttcttccaggcgtgggatcgggcacggcttgacccagcccgggccgcctttgcgcgcgtccatcttcaccaggtcggctgccgaatactccacgaccttgccgcgccggtcggcggtgcgcttgagggtcgggtcgtggatgaccatcaactcgccatccatggacaggtgcaagtccagttcgcagcggcgtaccccgtgcttgaggcattcctggaagctggtcagggtgttttccggtgcttcgcctttggcaccgcggtggccgtaaatcagggtcacagttgctcctatgcgccaggtctgctggcggggtaatacgaattcaggtgtcttgggcgtcgctctgttcccgcgccaggcgccgttcctgggcctgtttctgcaggatgtaacgcgccagcagctggcgttgggcgtcagtcatggcttcgaattccgtgccgacgtcaaaacctgtgcccttgggatcgcaatgggtgacccgggcgcgcagcagcaggccaagcgcctggggcatcagcaccagcttgaccgccaggtgcgcaccgggcgacaggggcgtggggttttggaagtcgataccgccctcggaaaggatcaccggctgcggtgcgccaacttcatccagcaggccgcgcgccatgatctggctgagcaggtccaggcgtttgttctgtactttgaggaaggcggccaggctgcgatctttctcatttatctggcgcaacaggtgctgggcctcgaattcactcaggtgcagttcactgagcagattgaatagcggcgaatcatccagcaacacttccttgctcgccgcttcgggagcagacaggcttttgatttggagtgcgatcatgtcgtcgatacggtagtattcgcggcgttcttcttcatctaatgtcgacatggcgaaccccaagtagcgttaatggtctgagtgtaaagctgcttaccagaccccgccaccgggacgtcttcttttcctccgaacaagccccgacatgttcagacctctcttcgtatttatcggcacgcgttatacccgtgcaaagcgtcgcaatcattttgtgtcgttcatttccctgacctcgatgatcgggctcgccttgggcgtggtcgtgatgatcgtggtgctgtcggtgatgaatggcttcgatcatgagatgcgcacccgcgtgctgggcatggtgccccacgcgaccatcgagggcgatgcgcccatcagcgactggcaaagcctggcggccaaggtcaagcagaaccccaaggtattggccgttgcgccatttacccagatgcaggggttgctgaccaacgacggcaaggtgcagaagatcctgctcaatggcatcgacccggcccaggaacgtaacgtgtcgatcatcgacaagttcatgttgtcgggcaaactcgatgacctggcgcccggcgagttcggcatcgtgatcggcgacaaggcggcggccaagctcggcgtgagcctgggcgacaagctgaccttcgtcgcgccggaagtcaccgtgaccccggccggcatgttcccgcgcatgaagcgctttaccgtggtcggcaccttccacgtcggcgccggcgagatcgacggctacctcggcctgaccaacctcaccgacctggcgcgcctgcaccgctggcagccggaacaggtgcagggcctgcgcctgaagttcaacgacctgttcgacgcgccgcgcacttcatgggaaatcgcccagcatttgggtgacagccagtactacgcccgcgactggacgcgaacccacggcaacctctaccaggccatccgcatggaaaaagccatgatcggcctgctgttgctgctgatcgtcgccgtggccgccttcaacatcatctccacgctggtgatggtggtgaacgacaagaagggtgatatcgccatcctgcgcaccctcggcgccacaccggggcagatcatggtgatcttcatggtgcagggcaccgtgatcggcgtggtcggcaccttgatcggcacggcggtcggcatcctggcggcgctgaacgtgagtgccgccatcgctggcctcgaaaccctgatcggccacaagtttctcaacgccgacgtctacttcattgactacttgccgtcccaggtgcaggcccaggacgtgttgatggtgggcggcgctgcgttggtcctgagtttccttgccaccctgtatccagcctggcgcgcggcacgtacccagccagcacaggccttacgttatgagtgaatcgggcatgagtgaaaaagcaatcctgagctgccgcaacctgggcaaatcctacgaggaaggcccggagtcggtggtcgtgctgtccaacctgcaacttgagctgcacccgggcgagcgcgtggcgatcgtcggcagttccggttccggtaaaagtaccttgctgaacctgctgggcggcctggatacgccgtcccagggcagcgtgtggctggccggtgaagaactgtcggccctcggtgagaaggcccgtggtcagctgcgcaaccgttcgctcggttttgtgtaccagttccatcacctgttgccggagttcaccgccctggaaaacgtgtgcatgccgctgctgatcggcaagaccgcgatcccggaggcccgccagcgcgccaaggccctgctggagcgcgtcggcctcggtcatcgcctggagcacaaaccggccgaactgtccggcggcgagcgccagcgtgtggcaatcgcccgtgccctggtgaacaacccgggcctggtgatgctcgacgagcctaccggcaaccttgactcccacacggcccagggcatcaaggacttgatgctggaactgagcacccagatgcgcaccgcgttcctggtggtgacccatgacatgagcatggcccgtcagatggaccgcgtgctgcacctgcaggaaggtcatctggtcgccatctgacccgtttcaagcccggtgcttcatgcgccgggctttttcattttttcaggcggtgcaagcgaatgttcagaccgttatcgattttcatcggcacgcgctatacccgcgccaagcgccgcaaccgttttgtctcgtttatctcgatgacctcgatgatcggccttgccctgggtgtgctggcgatgatcgtagtgttgtcggtgatgaacggcttccagcgcgaaatgagctcgcgcatccttggcatggtgccccacgccaccatcgttggtgtgaacccgattgataattggcagcccgtggccgccgctgcgatgaagaatccggaagtcaccgcagcggtaccgttcacacaaatggacggcatgttctcctacaaaggcgcgatgcagccgatcgagatcagcggcatcgacccggcacaggaaggcaaggtgtcgatcgtggcccagcatatcgtgcagggcaaactggatgacctcaaacccggcgaattcggtgtagtggtcggcgaaatcaccgcccggcgttttcgcctgaatgtgggcgacaagctgaccctgatcgtgccggaaatcagcaccgcgccgggtggcatcaccccgcgcatgcagcgcttgaacgtggtggggatcttcaaggtcggtgccgagctggatggctccatggccatgatccatatggccgacgctgccgagatccagcattggcagccgaaccaggtgcaaagcgtgcgcctggcggtgaaagacctgtacgcggcacccaaggtctcggcagacatcgccgccagcctgggcaccgcctacaagcccgatgactggacccacacccagggcagtctgttcagcgcgatgaagatggaaaagaccatgatcggtctgctgttgctgatgatcgtcgccgtggcggcgttcaacatcatcgccaccttgatcatggtggtgaacgacaagggcgcggacattgcgattttgcgcaccattggcgccacgccacggcagatcatggcgatctttatggtgcagggcacggtgatcggcatcgtcggcaccttgatcggcggcgtattgggcgtgatcgcggcgctgaacgtgagtgaactggtgggttggatggagcgggtcaccgggcagcatatcttcagttcggacgtgtattttgtcagtaacctgccttcgcagctgcaaggtggggatgtggtgctgatttgcacggctgggtttgtgctgagctttttggccacgctgtacccggcgtatcgggcggcgaagattgagccggcgcatgcgctgagatattcgtaatattcaagaccgctatcgggggcaagccccctcccacatttcgaatgtattcacaaatcaccctgtgggagggggcttgcccccaatagggccggtacagcttgcatcaatctccagcaggcaactcaatcacaaaccgcgtccaccccgtcccggattcacaataaatcctccctccatgcgcccgcacaatcgactgggtaatcgccagccccaaccctgcatgctcgctgctgccttcgtgccgtgccggatcggcccgatagaagcggtcaaacaaccggggcagcaactcggttggaatgccgtccccggtgttctctactgaaagtttcaccccatcctcgatttgcacacgcacttcgccgcctggcggggtaaagcgcagcgcgttatccagcagattcgacagcgcccgccgcaacattccacggtcgcccatcgtatgggccgtgccctcgcgaaccaggctgatctgcccgtcctccgccagcagcgtgaaaaactccagtaacgcatccacttcatcggccagtgccaaaggctcgcgcttgggcatcagtaggccatgatcggccttggccaggtaaagcatgtcattgaccagttgcgccatccattgcagctcttccaggttgctgtgcagcgcctcgcggtaatcctccagcgggcgtggctgggtgaggatgacctgggtctgagtcagcaggttcgacagcggtgtgcgcagttcgtgggcgatgtcggcggagaacgccgagaggcgctggaacgcatcgtccaggcggccgagcatggcgttgaaggcctgggccagttcggccagttccaccggcatatgttgctggggcaggcgctgggtcagggagtgggccgacacactggcggccacttcgcccatgcgtcgcaatggccgcaacccgctgcgggcagcccaggcgccgagcagggcggtggccagggctgacaagccgacggtgagccagatcagatgctgcatgcgctgcaggaaatgctggtggtgggtgatatcaagcatcagcgtcagttgtggcgagtcgggttggcccgccctcagcggcgcgttgtagacccggtagtcggtgtcggcattttgcaggctgtgcaggccgggggctgcgggcaagtcgacgctgggggcatcgtccagccagcgttggccggcggcggtgatacgcagggtaaggtcgggctggcgcctgagttcggcgcgcagttgcgcctcacgctgggccagggcttccggtgaatcgaccccctgcaaggtactgcgcagcgccaccagcttgctgtcgagctgttgctggtccagctcgatgaagtgcgcttcgctggcgcggttgaacagcacaccggcgatcagcgacaccaccgccgtgcaggcggcaaacagcaacgccaggcggctggccagggacaggcgcttgatcaattgacccgttcctccagcacatagcccatgccgcgcacggtgtggatcagtttgttggggaagttatcgtcgactttcaggcgcaggcggcggatggcgacttcgatgatgttggtgtcgctgtcgaagttcatgtcccatacctgggaggcgatcagtgatttgggcagcacttcgccctggcgccgcagcaacagttccagcagggagaactccttggcggtcaggtcgatgcgctggccgtcccgctcgacgcggcggcggatcaggtccaggcgcaggtcggccagttgcagcgcagtttcctggggcgtgctgccgccccggcgcaataggctgcgcacgcgggccagcagctcggaaaaggcgaacggcttgaccagatagtcgtcggcgcccagttccaggccgtgcacgcggtcttccacggcatcgcgggcggtgaggaacagtacgggaatgtccaggccggcgctgcgcacggcttggaggatctgccagccatcacggcccggcagcatcacatcgaggatcagcaggtcgtagtcgccggtcaatgccaggtgctggccgctggtgccgtcggccaccagttcggtggtaaaccccgcctcggccaggccctggcgcaggtagtggccggttttgggttggtcttcgacgatcagcagtttcatgggcggctcttggcaacggtggacgacggctttataccttgggtgccagggcaggagggcaacctgacaaagttgtaatctagcagtcagctggctggcagcggcgcattcttagagtgctccccaggcgagtcacacatttttggagaaaaccgatggcgttgcgtacacccttgttgttggccggttgcctgttggcgttgagtgttgaggcgatggccgatggcgctcatacctatgcgttcggcgaggcggcgccggcgagcaaagccacgcgtactgtggaagtgaccctgcaggacatttccttttcgcccaagtccctggatgtcaaagccggtgagacggtgcgctttgtactggtcaacaaagggcagttgctccacgaattcaacctgggcgacgcggcgatgcatgccgagcaccagaaggaaatgctacagatgcaggccagcggcatgctcacctctaccggcatgggcaatatggaccacaacgccatgggccatggtgcgatgaaacacgacgatcccaatagcgtattggtcgagccgggtaaaactgcggagctgacctggacgttcaccaaggccacaggcctggagtttgcctgcaacctgccggggcattaccaggcgggcatggtcggcaagctcaacgtcgattgatccgctggcgcttaggcgcgggggcaaaggctggtagactggcgtggtttatttagccaggtttccgccatgcatcccgcagccgaacattcgccgctgggcaagtccagtgaatacatctccacctacaccccgtctttgctgttcccgatcccgcgtgccgccaaatgggccgagctgggcctgagcgccgagaccctgccgtacaagggcgtggatttctggaactgcttcgaattgtcctggctgctgccgtcgggcaagccggtggtggccatcggcgaattcagcatcccggccgactcgccgaacatcatcgagtcaaagtcgttcaagctgtacctcaactcgctgaaccagaccgcgtttgccgatgcggccagcctggaagccaccctgcgcaccgacctcagcgccgctgccggtaaaccggtgagcgtacgcatccgcagcctggccgagatcgaggccgagggcgtgatggccttgcccggtgtgtgcatcgatgacctggatatccgcgtcagcaactacgaacacccgcgcccggaactgctgcgttgcgatgattcgcgcgttgtcgaagaaagcgtgcacagccacctgctcaaatccaactgcccggtcaccagccagcccgactggggcagcgtggtggtggagtaccgtggtcacgcgttggaccacgccagcctgctcgagtacatcgtgagctttcgccagcactctgacttccatgagcaatgcgtggagcgcatcttcctggacttgcagcgcctgctgaagccggaaaaattgacggtgtatgcgcgctatgtgcgacggggtgggttggatatcaacccgtatcgcagtactgaggatgtggcgttccagaacgttcgcctggcccgtcagtaggcttattgcaagataaatgtgggagggtgcttgcccctcccacatgtcgggcagattagatccccatgctgcccagcgtattcatgatattgcgcaaggtgccggaaatcaccgggtgctcggcgtcgaactcgatggccgcttgattcacatcgtcggaaatgctgggtgtctgggtggccggttccagttcaagttgcaattcaaacttggcaatcaaggcttccagcgctgtgcgcttttcttccgacagcggcggttcctgttccaactgcccgcgcaggatctcgacctgttcttccagttttttgcgatcaggcatgacgtgtttccttttatcgataggcactggcatagaccacggcacgccgcgaaaggtctacgggctgacctgtagattaatccaccggcgccctcagtgcatgatctctatcagggcttctcgcctttgaggcgccgtaagctgatatctgccaggcaggtgcccaattcaccgaggtgatcgatcaccgagtgcacacccaacccatacaacgccacggtggccttgccacgtttgtgctcgcgttgctgctcggtcagtgcttgccactgctcgggggccagcccgcacagcgagccgcacgaagccaggccgatggtccacaagccggcattcaggcctgactgcaacagacgcggctcgccgctgaccaatacacagccttccaggcgttcgatgttcaattccatcagggcttgccagcacgcgtgcggggcgggccagcgaatggaggagggtgatgtcgccttgacccagttgggtagcgtggcggccagcggtgtggtgacagcgggggggagttcatccagccaggcgcagggcacgccttgttccttgaggctgcgcaggattttcagcgcgccggtagtggcttgggagtcgggtgcgggggaatcggtgcgtgccctggaaccgaaatccaccaagcagccactcaggccaaacagaacggcagtcaaggcgggggtgctggcgatggctatctcggcgtgaggcatgtcgacatccctgaaatagcgctaacgctatccaggcaccatgacaggccgatgacagccgggataattgtaggaattttgtccatttttggtctgacgtttcctagttactgcctaattggcgacttccgtcatatactgacgtccttattcagggcatagcgcccatgacagaccattcaaggagcaaaagctatgcgctggagccactacttcgctcagctgtcagtgtgtgccactgtcctgctggcgccgttcgccgcacaggcagcatcggaagacgatccatgggaaagcgtcaaccgtccgatcttcactttcaacgacaccgttgacacttacgcgctcaagccattggcccagggttaccagttcgtgactccgcaattcgtccaggatggcgttcacaacttcttccgcaacatcggcgatgtcggcaacctggccaacaacgtgctgcagctcaagccccaaaaggccggtgtagatacggcccgtttgctggtcaacaccaccttcggcgtgttgggcttcatcgatgtaggcaccaaaatggggctgcaacgcagtgatgaagacttcggccagaccctcggttactggggtgtcggcagcggcccttacgtaatgctgccgctgctgggcccgagcaccttgcgtgacgcgccgtccaagtacgtggacagctacacccagccttaccgctacatgaacgatatcggctggcgcaacagcaccttcggcctgaatatcgttgatacccgtgccagcctgctcgacagcgagaagctgatcaccggtgacaagtacacctttattcgtaatgcgtacctgcagaaccgcgagttcaaggtcaaggacggcaaggtcgtcgacgacttttaagccgtgatgttttgaaatgaaaaaggcgacccatgtggtcgccttttttgtgcgcggttttcagcgcattttcaggatcctgagacccaggtgctggtcttcgccggtggttttggtccacaccacctcggtgtccgcctccaggcccttcagcgcggcgtgctccgagtcgatgcgtacggtcaacaggtcgcccgtgttgaactggcgcggcgcctgcacctgcatgccagagctggaaaggtccacgcaaaccccggcaatctcttgccctgcatggatcagagacacatcggcatccacacgcatgcggatgaaatcgcgtttttcggcgtagtcgcgctcgtgttcgctcatgggctccatccttactttgtgttgtggtcgtgcctgttcttataactcccggtgatttgcggtgtaaagacgcccggcgaccatcggcatgagcttgaaacccctgacggatgggagtaccgtctgcgccttagaagggcacctctgctttacctttgtgcatgggaaaaatcccaatgctttgtaggacagagaggctagaaagcgaatccagtacgtgagcccggccattgtcgcgccacctacgccaacctaattctggcgccgtttgcccacatgcaaaaaaccagtgccacgctgctgataatcgatgacgacgaagtagtgcgcgcgagcctcgcggcctatttggaagacagtgggttcagcgtcctgcaggccagcaatggccaacagggtctccaggtgttcgagcgcgaccagcccgacctcgtgatctgcgacttgcgcatgcctcagatgggcggcctggagctgattcgacaggtgaccgagctcgccccgcagacgccagtgattgtcgtatccggcgccggcgtgatgaacgatgccgtcgaggcgttgcgcctgggcgctgccgattacctgatcaagcccctggaagacctggccgtgctggagcactcggtgcgccgtgcgctggaccgggctcgcctgctgctggaaaaccagcgctaccgcgaaaagctcgaaaccgccaaccgcgaacttgaagccagcctcaacctgctccaggaagaccagaatgccggtcgccaggtacagatgaacatgctgccggtcagcccgtggaccatcgacgaattccagttcgcccaccagatcatcccgtcgctgtacctgtcgggtgatttcgtcgactattttcgcgtcgacgagcggcgtgttgcattctatctggccgatgtgtccggccacggtgcttcctcggcttttgtcaccgtgttgttgaagttcatgaccacacggttgctgttcgaatccaagcgcaatggcaccttgcccgagttcaccccctccgaggtgctgggccacatcaaccggggcctgatcagctgcaagctgggcaagcacgtgacgatggtcggcggcgtgatcgatgaagaaaccggtcttttgacctacagtatcggcggtcacctgccgatgcctgttttatacactcctgacagtgtgcgttacctggaagggcgtggtctgccggtgggcttgttcaatgaagccacctacgaagaccacatcctggaactgccgccgaccttcagcctgacgctgatgtccgacggcattctggacctgcttccagagcctacactcaaagagaaagaagccgccttgccccaaaaggtcaagtcggcgggcggcagcctggatggcctgcggcaggtttttggattggccacgctaggggagatgccggatgatatcgccctattggtgttgagcaggaatctttgatgagtaccggaagaatccaattcgccgagcaagacgggaccttcgtcctgaagtttgtcggtgaagtgcgcctgaccttgtgttcggcgctggatgcgacgattgagcggatcttcacagcgctgaacttctcggcgatcgtgatcgatctgaccgaaacccgcagcatcgatagcaccaccttgggcctgttggccaagttgtccattctgtctcggcagaaggtcggcctgttgccgaccgtcgtcaccacccacgaagacatcacccgcctgttgcagtccatgggctttgatcaggtgttcaacatcgttgaccgcccaatcccatgcccggaatgcctgaccgacctgccgtcccaggaccagtccgaggaagtcgtgcgggtcaaggtgctggaagcgcacaagatcctgatgggcttgaacgattccaaccgcgaagcctttcacgacctcgtcaacgccctcgagcgccactgaccgcattccaactgtgggagggggcttgcccccgattgctgagggtcaatcacaacatctgtgcctgacacactgctatcgggggcaagccccctcccacattgaatctagataggcttcagatctactgagcgtaaaaaagggcggcacccgcgagggtgccgccctttttgtcgccgtctgccttacaacttggcagtcagcaacgcctccagcttctcctggtcccgagcaaactgacgaatcccctccgccagcttctcagtcgccatcgcatcctcgttggactcccaacggaactgcgcttcagtcagatgcacgcgcgcttcaccggcatgcccaggcgataacttgcgctccagcttgccttcatccgccgccagcttctccagcaggtccgggctgatggtcaggcgatcacagcctgccagctcttcgatctggctcaggttacggaagctcgcacccatcaccacggtcttgtagccgttggccttgtagtagttgtagatgcgggtcaccgactgcacgcccggatcttcggcaccggtgtagtcgttgccgttggccttcttgtaccaatcatagatacggcccacgaacggcgaaatcaggaacaccccggcttcggcacaggctacggcctgggcgaaggagaacagcagcgtcaggttggtctggatgccttctttttccagcttctccgccgcgcggatgccttcccaggtggaggcgatcttgatcagcacacggtcacggccaacgccggccttctcgtacaggtcgatcaggcgatgcgcacgcttgagaatggcggcttcatcgaacgacagacgggcgtccacctcagtggaaatacgacccggcaccactttgagaatctcttgacccaccgccaccgcaaaacggtcgctggccaggcccacatcgccattgcagtcctgtacggcttcatccagcagcttggcataagccgggatcgacgccgccttgagcagcagggaagggttggtggtggcatcctgcggcttgagcttggcgagggtggaaaaatcgccggtatcggctacaacagtggtgaattgcttgagttgttccagcttggaagtcatgggcgtgctctgtcctgtgggtctgatgacattacccgagcaccggcaggcgctcaagggcgcaaatgcgttcgatcgtttgcgagggcaacaacctgaaaacggccgtttgaatgccttgtcttggtgctaaataggaggccaaaaccgccggcaggttcaactcaattaccgaacgaccaccacaattcaaaggtgggaggggcttgcccccgatagcgacagaccagtctccccggacccgaactggccctcaccgcccttccagcaaagccccagcctgatccagcaacgccaacggatcactcgccttatgaatatccaccgacaacaactgcctgaacttgcgcgcccccggaaaaccagtgcccaaccccagaatatgccgagtgatatggtgcatcgaaccaccactggccaaatgctccgcaatatacggccgcaactgcaccagcgcctcagcccgactgatcaccggcgcctcactgccaaacaactgctgatccacctccgccagcagatacggattgtgataagcctcccgacccagcatcaccccatcaaacacctgcaaatgcgcctggcactgctccagcgtcttgattccgccgttgagcacaatctccagctccggaaagtcctgcttcaactgcgccgccacgtcataacgcaacggcggaatgtcacggttctccttcggcgacaacccttccagaatcgcaatccgcgcatgcacggtaaaactggtgcaccccgcgtccttcaccgtcccgacgaaatcacacagctcggcgtagctgtcccggccattgataccgatgcggtgcttcaccgtcaccggaatcgacaccgcgtcacgcatcgccttcacacaatcggcaaccagggcaggatgagccatcaggatcgcgccgatcatattgttctgcacccggtcgctggggcagccgacgttcaggttcacctcgtcgtagccggcggtttcggccatacgcgcgcaagccgccaaatcagccggaacactaccgcccaactgaagggccagcgggtgctcggcttcattgtggcgcaggaaacggtcgtggtcgccgtgcaggatcgcgccggtggtgaccatctcggtgtagagcagcgcgtgcttggagagcaggcgcaggaagtagcggcagtggcggtcggtccaatccatcatcggggcgacggagaagcggcgggagagggcttgcgatggagctatgactgaaggcattggagtcttggatggagaatgcgaaggacgggcagtttatcaggaatgggtcggagggggctgggtgttgatcgtcgtgtcgcgagaaccaatattgaataaatccgtcccttttttcccataggagggataggcgtaataggtgattgcatattgagatcacgggctaaaaagagtaggttgctttgcaacgctgaagcttcttaacgttgttgaaggactgtattgtgaaaggaatcaagccgtttttagtgttgcgatactcgctgatcgaaaataagcaaggtgcccttgttccttccccgttacctaaacctaagggcgcggttgttgtagcggccctccaggatgacggtcgtgagtttgttaaaaacaaagttcgttatagttttgtggggttctcgtatgctgaacccaccgctaacgaatttcctaaagacaggtttttggtgggaaagactgctaagcataagttaactaaagttggtgataaggttcctggtgatatagttgcccacgacgctgatgattgggttccagtcattactgtggttgatactgtggatcagtatatttttgtgcagcatgattggcgatttggtacggatgaacaaattgcaaacgcaattcaagcagggcttagggatcctgtcttgaatgagtttaattattcaatatttattgagcctaagactattaggggtgaattttggaatgttgttaggtctcatagaaagatttttgaaattgagcttgaactcatctctccaaatattttagaaactaacataaaggctcgtgatgctctgagggcaatgaaggagctcttcggtcaggatgaggtgaagatcttactgagcaatgagtttggagatctcaaagttccggcttcccctgtagaagactatattgattatattgaggaaggggaaggtaaatggagtgtaacaactgagggcgattacaacggtaagcaagtacataaaagtacatctgccattgtgaaaattgatttaaatgtgccttctgatgatgtggtaatgcaagagaatcaattggaacttgaaactgggcagccggccccaggtcgttctcttcacgatgctcgaatggtggctgaagtgtattctgctataggtgatttgttgaggcgttagcatgattcgcctaatatttattttcattgcatctttcaccctttgttacctgtcgctatgggggacggggggagcggtgagcccactattcagtaatgtaaattcggttttgttcgttttaggcgcgctgtttggtgctctttcgttagctttctttaactatgttgagggtgttatgaaagatgttccgaaaaaattgaagcagcaaaaacctacagcttatgcaatagttgttgatactttgacgaatttgaagcgtgaggttatcgttaatgtcgttttggtagttatttttttaatggttgcattcgtattgggtgcaatgattgaaatggcatttatgcaaatgttagagatgtcaaagttttgggtgtggtcagtcttgtcggttcgcggagcttgtctttttagtgttctagtggtggtgtttgtccagttgtcggggttcgtgacagcgaacaatttacgggctgaaatttccatgtatggtgagtaacgtcttgtggtttttcacagtcttaaaatcgcgggtcttatgctaaatctcgcgcgctgctcaccctattagtcgactttgctcccgggtagatttttcacgctgatagtcgatgatagtgcgcacaccacaatatcctgttcgcagtccactatgtttttaaggagttttcccacacttatctcggcttgcccctcagaccacccatcgctaacctccgcaagtcgctgcaaacccagcgaccggaggtggaagtccgtattgctaaggcgttttaactcccggaaatatttggagcttcgcccatgcctaacaaatcacgcagtccttatgtcggtcaagacagtgctcccgccgaaaacccagccggcaacttgttcctcgtcagccccaacatcgacaccgaaaccctcctggccaacgccgccgaaaacctcgcatccgcgaaccaaatggccgccaatctggccttcgacctcgatgacccgcaccgcgccatcgtcctgggcctccaacaactcatcgatctaagtgctctactcatcgaccgagtccaggaacacgtcgcacctgccgcctgtaaggccaccgcctgacacccaaccccgccgccttaccccaaggcggcaacctgaacccatcctgtcacccagcaaagtttcatcatccccggcgcttttgaggtctacgatcctcttcaagagaggacctccgcgcctccattccacagggaactgaaaccatgatctcgaacctcgttaaagtcgtgatggttgctggcacgttgctgttgggcgcttgttcgacagggtcggccggcgtgagcagtgacccgtgtttttcaggcggatgccaggcgtttggggaccatagccccagcaaagccgccaagatgaattttggcggcagtgggctggggagtagttatggggagtatgggtcagggttgttgcatgatgattgatggggtggtggggcagtcattgggggggtgactgacccattgccatcgggggcaagccccctcccacattggagctgtgatcggcgcaaaaccgggggcgtcagtgcccccccttcatgcggcgggcgatgaggtagatgcccaggccgatcagcgctgtagcggcgccgatatagccggtgctggtccagccgtacccggctgtaatcgccatcccgcctagccacggccccagcgcgttcgccaggttgaacgccgcgtggttcgacgccgccgccaggctcggggcttcgtgggcgatgtccatcaagcggatttgcaggggggccgccatggcgatcatggtgccgaccaggccaatgcccagcagtacgctccacagcgaactggcggcgaaggtgaagaagatcagcacggccatcgaccacaccatgatccagcccacggcgcgaaattgcaggcggtcgaacaacttgccgccggcgatgttgccgatgatgccgcctgccccaaacgcggcgaggccgaagggaatccactgcggcgagactttggtcacttccagcatggtcggcgccaaatagctgaacacgcagaacatcccggcaaacccgatcgcgccaatcgacaacgccatccacacctgcggcttagtgaaggcgcgcagttccttgcgcgggtcgctgcgttgttcgtcatggcggtggggcacgaattgccagaccagtgcgatggtgcacagggcaatcacgctgaccagtgcaaacgccgagcgccagcctaggtgttggccgaggaaggtggcgatggggttgccgagcagcatggccagggtcaggcccatcattacgcgggccacggcgccggcgcgtttgtcgttggggaccatgctcgaggcgaccacggcggcgatgccgaagtaggcgccgtggggcaggccgctgataaagcggaaggccaccagcgagccgaaggtcggggtgaaggcggtggccaggttgcccaaggcgtacaggcccatcagtagcaacagcatgtgtttgcgtagtagcttggcgccaagaatggccagcagtggcgcgccaaccatcacgcccagggcgtaggcgctgatggcgtggccgacttgcggttcgctcaaattgagattgtgggcgatgtcgggcatcaagcccatgatggcgaattcgccggtgccgatcgcgaaggcgcccacggccatggccgcttccattttggcggcgccgcgcgcgggcagcacatgcccgggtgtttgctggatagtcatgggtaactctggttggatggagcgcacgaaggagagccgccgatgctacgcaagcagcggcaaaggtgtctagaacagcggtttgcgtgagagttccaggcctgtgaccccaggtcgcgcctgccacgcttgacatcgacgggttaaaagctgcgatttagagctgtcaattggccaaacggcgcataaacgccgtttgccgtgatattctgcgcgccgtcctggtctagcatcccctgggtacgtacgtcccagcggttggctgtcgcccaggtagctgaagccaataatgataagaagtcagcgcagaagggacataaacagtgaggtcgatacgtcggccttgtgtgcccaccctgcggccctctcgtgaatgtgcataccccgcggtgctgccttgcgcagctgtgatggagggttgcccatgatcaggggcggtagggcggatggcgttttatcataggtgctactgatgtttaaaaaagtaaacactgccctgctggggctggctttgtcgctggggatcagctccgttcaggcggaagaggcaaagaaagtcgatgtgctgctgattggcggcggcatcatgagtgcaaccctgggtgtctggctcaatgagctggagccgggctggtcgatggagatggtcgagcgcctggatggcgtggccgaagaaagctccaacggctggaacaacgccggtaccggtcactcggccctggctgagctgaactacaccccggaagacaagaacggcaacgttgagatcccgaaagcggtcgagatcaacgaagcgttccagatttcccgtcagttctggtcctggcaggtccgccagggcgtgctgaaggacccgcgttcgttcatcaacaccacaccgcacatgagctttgtgtggggcgatgacaacatcaagttcctgaaaaaacgctacgaagccctgaaggccagcccgctgttcgccggcatgcagtactccgaagacccggcgcagatcgccaagtgggttccgctgatgatggaagggcgtgacccgaaccagaaaatcgcggccacctggagcccgctgggtaccgacatgaacttcggcgagatcacccgccagttcgtcgctcacctgcaaaccacgcctaagttcgacctgaaactgtcgagcgaagtgcaggacatcaccaagaacgccgacggttcgtggcgtgtgagctacaaaaacctgaaagacggcaccaagaccgaaaccgacgccaagttcgtgttcatcggcgccggtggcggtgcactgcacctgctgcagaagtcgggcattcctgaagccaaggaatacgctggcttcccagtgggcggctcgttcctggtgaccgataacccaaccgttgccgagcaacacctggccaaggcctacggcaaggcttcggttggcgcgccaccgatgtcggttccgcacctggacacccgcgtgctggatggcaagcgcgtgatcctgtttggcccattcgcgaccttctcgaccaagttcctgaaagaaggctcgtacctggacctgctgaccagcaccaccacccacaacatctggccaatgaccaaagtcggtattcgtgaatacccactggtcgagtacctcgccggccaactgatgctgtccgatgacgaccgcttcaaggcgctgcaagagtacttcccgaacgccaagcaatccgactggcgcctgtggcaagccggccagcgcgtgcagatcatcaagcgtgacgaagagcagggcggcgtcctgaaactcggcaccgaagtggtcagctccgccgacaacaccatcgcgggcctgttgggtgcatcgccaggcgcgtccaccgcggctccgatcatgctgaccgtgctgcagaaagtgttcaaggacaaggtcgcgactcctgagtggcaggccaaactgcaccagatcgtaccgagctacggcaccaagctgaacgacagcccggaagcggttgccaaggaatgggcctacaccgccgaagtcctgcaactgcctacgccgcctgtgattccacaaatggctgccccaaaggctaccgaggctgccaagcctgcggctgagccaagcaagccggcatctgacctggcgctgtaagccaggctgatgcacaaaagcccgctgaaccggtaacggtcagcgggctttttcatggccgtgagaacagttcagcaacctgacagacgccacctgttaaaaatattccagagccaagcaggagcgaggccgcaacaagggggcattttttaccagtgtcagtgttgggcgcacgcgcccgagggttttttgtatgtggctacgttatgcagcattggcggccatggtcgtcgcggcatccggatgtgtgcaagagcgcgtcgtgcacgagcgcaggccggtgcaacgtgagtatgtggaagtcatcgcgccacaaccgccgccggtgcaggtgatcgaagtcgagccgcccgtgcgctacggctacgtctggtcgcgtggttactggcgctgggacggcgggcgatatgtggctgtacacggccactgggagcctgtacgtgaaggctatcgctatgtgcatccacattgggtgcagcgcaatgatgggtatcactggcagggcggtggctgggttcgctgagccctggtttcatcggcaacgagcgttaaatcggcttctgggtgcccaggagccgaacctcccgcagcaacgcggcgccgagttgatcggtgcccagttcccggtagcccacggcctttacctcgccgttctcctccgcctggataaggatcaccggggtttccttgccggtggtttcgtcgacatgcatcgcgtattgggggatatccagcttgatcggcgtccccgccgccttgcccttcacattgatcaggaaggcggcgcaaccgctgtcgacatccgcagtggtggcggagcggccgctgacaaagcaggtctttggtagatcgggccaggtgatggtgtcggccagggcgagagtgggggccatggccagggcggcgagtagaagcgtgcgcacgtcggtctttctctcgatcaaggtgaaaacggtttgtaccaaagcccgcccgcggccgcaacgccagggttcaggccagccgcttcatgccggtggtcttgatcgcgttgaggtcgaaggttgccgtgtattcgcaaccggcggcgtgggcgcagcgctcgatcaggcagtctgcaaagtcagccttgttcgccacaaacttgcgcagcgcctgccagatgatctccccatgctctacggtcaattcgcgggtgcgcagcagggtctcaagcactatcaccacatcacttttggccgactggtagcagctttgcagtacccacaccagctccacaatggagaccaggctgataaagcccggcgaggcggtggtcagtgattcgatcagctcggatgccttggccgattgcacgggatcatcctgggtgacgtagcgcaccagcacattggtatccagcccgatcatccggcttttgccccctgcgctgcgatggcttggttcatctcttcgatagagatggtcctggcaggcttgcggatcaaccctttgaggtcatgcaccgttttgctcgcggcaatgatggaaaactgcccatcttccatttctacgaattcaactcgatcacctgtttccaggccgagggcggtcctgacctggacaggaatggtgatttgacctttcgaggtcagtgtagcgatagccatgttgaagatctccatcgtgatattccttaccttagggtaaggaatgacagaggacaatatccgttggtccatagggtgctcatctggtgtgggttagtcggaacaggtaaaacactagtcccaactgcccacgcccgctgggcctaaagagatacaaaccatgaccgaccgccacctcgttatccctgcctccatgcaccccatcgtcgagcgcgccggctacgtgcctgcggtcaaggttggcaagacgttgtactgcgccgggcaggtcgggcgtacggctgggttggcggtgatcgaggaccccgcggcgcaattcgtcgcggcctgggacaatctgcggcaggtgctggaagagggcggttgcacgttcgacgatgtggtggacatgaccacttatcatgtggatatgagccagcacatggcggttttccgtgaagtgaaaaaccgcctgtttccacgtgggcattgcgcctggaccacaatcggggtgtccgaactggcgcaccccggcctgctggtggaaatcaaatgtgtggcggtacagcgctagcttattgcaccacgcggtagcacggtacatacgccgcgccgcccggcaacttcatgcggtgctgggcgacgaaggcctgtagcaactcgtccagcggtttcatgatggccgggtcgccgtggatctcatacgggccgttctgctcgatcaggcggatgcccttgtccttcacgttacccgccacgatccccgagaacgcgcggcgcaggttggcggcgagttcatggggcggcagggcgtggctcaattgcaggctggccatgttctcgtgggtggggtcgaacgggcgctggaagccttcgtcgatcttcaacagccagttgaaatggaacgcgtcgttgcgctcgcggcggaaatgcttcaccgccttgaggccggcagtcatctggcgtgccacttccgccgggtcatcaatgatgatctggtagtgcgcctgggccgcttcgcccaaggtggcgccgacgaaggcatgcagttgttgcaggtacggcgcggcgtgtttcggcccggtgaggatgaccgggaacggcaggtcacggttgtccgggtgcatcaggatgcccagcaggtacaggaattcctctgctgtaccggcaccacccgggaagatgatgatgccgtggccgacgcgcacgaacgcttccaggcgcttctcgatgtccggcaaaatcaccagttcgttgacgatggggttcggcgcctcggccgcgatgatgcccggctcggtgaggcccaggtagcgcccgccggtaatccgctgcttggcgtgggaaatggtcgcgcctttcatcggacctttcatcacgccagggccgcaaccggtgcacacgtcaaggctgcgcaggcccagctcgtggccgaccttcttggtgtatttgtattcttcggtattgatcgagtgcccgccccagcacaccacgatcttcggttcgacacccgggcgcagcgtacgggcgttgcgcagcaggtggaacacgtagtcggtaatgccctgggagttgctcaggtcgatgcgctggctgtccagctcgttctcggtgtagacgatgtcgcgcagggcgctgaacagcatctcgcgggtgctggcgatcatttcgccatcgacgaaggcgtcggccggagcgttcagcagttcaaggcgcacgccgcggtcctgttggtggatgcgcacttcaaaatctttgtaggcgtcgaggatggtcttggcgttgtcgatgtgcgcgccggtgttgaggatcgccagggcgcattggcggaacagggtgtagatgctgccggtgccggcttcgctcagttgctggacttcacgttgagacagggtttcgaggctgcccttggggctgacggaggcattgatgacttgacgttggggcattctgattccttgaaagcgcagccaccgcacccgcaaggggccgcgatggcttgagaatgatgggcgccgaattcggtcgcacgagacggttatttacctcacgcgcaaggtcgagcgcaaataccgtccagcaccatcatgccgcagaactcactgaatcagcttccagtttttgtagaaaacccgacgcagggtaaaggccatcccggcaaacccagcgatcacggcattgagcacccgggggatcggcgtcggtcgcacgatatcgataaacaggcagtaacgcttggcgtcgtttttgttgaaagacgcatgcatcaaggtgtcatcgaaaataaacagcgggtcgtcgtgccagtaatgcttgtgctggcccacctggatgtagacgccctcgtgatgcggtgccggggccatgttgtagagcacgcggaacatcatgcgcagcgggccgaagtgaaaggaggtcgagcggttttcattgaacaccgacacaccgatggtcttcacgaacggcagtttttcgcgcagtttcggaatgtccagggtggtctcgatggcttggccgtaccactggaagaacaacatgccgcgtttcttctcggccatgcgctcatccaggtagccgatgatttcgtccttgtgggccatggcatcgttgatcacctgttgcaggtcttcacgccaggcgggtggcaggtcggccatggtgtagacgtggcggttaggcgaactcaacaggtcgaacaaggtgttgaacggggccagcagccaagtgttacggccactgccgataaaatactttttgatcgtcgtgcggtcgtacagcccgttgcgcaaaaagtcatagacaccacacaccagcaccaggcccaggaacaccagggtggtgaccgggaagcaataaataaccagcagcacgccgatgatccaggcggccgagactattttcttgcggttgacactcgcactcatgaaactcaactccaacgggggaaggtgcacgagttccagtcctcatggcacccagagatgcgaagacatgaaacataatgaaacaatctccctatgatagggctttcccccgcagccgggcgttttaaatattgcgaaattgtgaaggctttacacagtttttaaccccggcggcgctgtgtggattggattttgtaaacagaagatttgcgactatcgtgacgcttcggttttttggacgtcatagaccggtacgattgaagttgaatggccaccactggccttcggcaccttggaagaggcagaaattttatgatcatcaaaccgcgggttcgtggcttcatctgtgtgaccgctcaccctgttggctgtgaagcgaacgtcaaggaacagatcgactacgtgacccaacacggcgtcatcgaaggcggcccgaaaaaggtgctggtcctcggtgcttccaccggctacggcctggccgcgcgcatcagtgccgcgtttggttgtggcgccgacaccctgggcgtgttttttgagaaagaaggcgaagaaggcaagctgagctccgccggctggtacaacagcgccgcgttcgagaagtttgccgtcgaaaaaggcctgtacgccaagagcatcaacggcgacgcgttctccgacgagatcaagcgcctgaccatcgacaccatcaagaaagacctcggcaagatcgacctggtcgtctacagcctggccgcgcctcgccgtaccgacccgcaaggcgtggtgcacaactccaccctcaagccgatcggcaaggccgtgaccctgcgcggcatcaacaccgacaaaggcgttgtggtcgacaccaccctggagccagcgacccaggaagaaatcgacggcaccgtcaaagtaatgggtggcgaagattggcagctgtggattgacgccctgcgtgacgccgacgtcctggccgaaggcgccaagaccactgcgttcacctaccttggcgagaagctgacccaggacatctactggaacggctccatcggcgaagccaagaaagacctcgacaagaaagtcctgaccctgcgcgacaacctcgccgcgctcaagggcgacgcccgtgtgtcggtgctcaaggccgtggtcacccaggccagctccgcgatcccgatcatgccgctgtacctgtcgctgctgttcaaagtgatgaaagagcagggcacccacgaaggttgcatcgagcaggtctacggcctgttcaaggacagcctgtacggcagccagcctaaactcgacgccgacggccgcctgcgtgccgacctggccgagctggaaccgaaagtccaggacgccgtggcggccctgtggaaccaggtcaccgacgacaacgtcaacgaaatcagcgattttgccggctacaaggcggagttcctgcgtttgttcggctttgaaatcgacggcgtggactacgaggctgacgtgaatccgaccgtgaagatcaacggcctgattcaggcgtaagtgatccggttcaaaaagacggcccttcggggccgttttttatggccgctgaaaaaggctgccttcagaaccctcttacacatttttgagcagcgtccgatcgctccgatatgccagactccagccgctatcacattcaggctaacggaggatctgatgacgattcgtgcagtggtttttgatttcggcggtgtcctgttcgactggagcccgcagcacctgtaccgcaagctgattgccgacgagcatgagcggcaatggttcctcgataacatctgcacccaggcctggaacaccgagcaggacgccggtcgctccctggccgatggcacccgcagcctgatcgagcaatacccgcatcatgagcgtttgattcaagcctattacgaccgttggcacgagatgctgcgagggccgttgccggaaggtgtggcgatcctcgaagcgttgcaccgagccaatatgccgttgttcgggcttaccaactggtctgccgagacgttcccctatgcgcgggccaattacccgttcctgcagtgttttcgcgacatcgtggtatccggcgagttgaagctgatcaagcctgacgcggcgatctatcacgccagcctcagccaggtacgtgcgcagttgccggatatccagccggctgaagtggtgtttatcgatgacgttgccggcaatatcgaagcggccatcgcactgggctggcaggggattcaccatgtgtctgccgagcgcacggccgcgcagttgcgtgagttgggcgtgggcttctagcgcgcccacttttccatggcgaaatccacgaaggcgcgcagcttgggcaggcgatatcggtcctggccgtagagcagatgcatggggcggctgggcagtcgataggtggtcaacaaggccaccagtttgccgctctccaggtccggttgtaccagggcatcggccagcatgatgatgcccatgccgttgacgcccgcctggcgcaagccttgcgagctgttgatggtcaatgagccggacactggcacttccacctcgccgctatcgtcggtcatgcgccagagtttttcggtgtcgcgccaattgtcatttgccgggtaggcgaacgccaggcagtcatgttgcttgaggtcctcgggtttcgaaggcgtgccgtgtcgtgccaggtacgcaggtgacgcgcagagggtgagggtgtagtcctgcattggccgagcaatcaggctcgatgcttccagttcgcccagacgtatcgccacgtcgaagccgctgtcgaccaagtccatccgctcgttgctcagcaccacgtacaggttgatcagcgggtagcgccgggaaaactcgctcaaggccggtgtaaggcgttcggtgccgaatacggggggcgcagtgatgcgcagggtgcccttggggacatcactatgggcttgttcggccagttgctcggagtcggccaccagccccaatacttccaggcagcgctggtaatactgcccaccaaattccgtgaggctctgtttgcgcgtggtgcgcttgagcaggctgacgcccaggcgttgttccagcgcgcgcaggtggttgccgaccatggtggtcgacatcccgcaggcctgggctgcggcggtcatgctgccagtctcgaccacttttacgtacaccgacattgcctggaacagatccattatcaagtcctgatttaaagtcattgcaggaatgtgcagtttatccagctcaggtggctaacgatactgaagccatcccaacgatgcactggagcccgcaccatgaccgccgcctgcctgatgaccacttaccaacccctggcgctgagctttacccgcggcctgggcacgcggctgtgggaccagcagggccgcgaatacctggacgctgtggcgggtgtggcggtgaccaatgtcggccactcgcaccccaggttagtgacggccatcagtgaacaggccgggctgttgctgcacacctccaacctctacagcatcgactggcaacaacggctggcccagcgcctggcccaactgtctggcctggaccaggccttcttcaacaactcaggggccgaagccaatgaaacagcgctgaaactggcgcggctgcatggctggaaaaagggcattgaagagccgttggtggtggtgatggaaaacgcttttcatggccgtacgctcggcaccatggctgccagtgatgggccttcggtacgcctgggtttccagcggttgccgggggactttctcaaggtgggctttggcgatctggctgcgcttgaagccatcacccagacgtttggcgcgcgtatcgccgcggtgctgctggaaccgatccagggtgaaagcggcgtactgccggcaccgccgggctacctgaaagccctgcgtgatcactgcacccgccatggctggttgatgatgctcgatgaaatccagaccggcattggccgcaccggcgcctggtttgctttccagcatgaaggcatcgtcccggatgtgatgaccctggccaagggcctcggcaacggcgtacccatcggcgcctgcctggcgcgggctggtgtggccgagctgttcacgccgggcagtcacggcagcaccttcggcggcaacccgttggcctgtcgggtcggctgcaccgtgctggacatcatcgaagaacaaggcttgctgcagaacgcggcgcaacagggcgagcgcctgctggcgcggttgcgggtggaattggctgagcacccgcacgtcctggcgattcgtgggcaggggttgatgatcgggatcgagctcgcgagcccttatcgtgacctggcccagcgcgcggcccaggaacacggcctgttgatcaacgtgacgcggggcaaggtcattcggctgctgccgccgctgaccctggatgccaaggaggttgagatgatcgtgcgggccattacccggttactggatcaggcccattgagccattcctggttcagggtttcggtatcgcccaggtactccaacaaccaggccatggccggggacagcttgtcctgtgcccaggccacacacgacgggctggccggaaacggccggctcaattgcagcgccaccaactccccgcgttcgatccatggcaacacctgatgcgccggggccatgccgacacacaggccatcacgcaggcaatcgagggccgaggaccaattcggcactaccagccgtcgctggttatccagggtccaggtgtcgcgcttgggcaggttgcgtgatgtgtcggtcatgcacaacgaggcgaagggccgcagttgatcgtcactcagcaagccttcgacgctggccaacgggtggcgcgcgctgaccacacacagccagttcaacaagcccatgtcgcgaaaggtaaagcggctggccaccggcaccgcgctggtggcgccgatcacaatgtcggtgcgctcatccgccagggcatcccacacgccgttgtacacctcgtactccagcaacagctcgacttcaggaaattgccgatagaaatcaatgaccaactgccggcagcgctggggtttgacgatggaatccaccgccaccttcaactggccactccagccgttggccacttgctggcaaaggcgtcgggtgccgagcatttttttcatcacgccacgggcttcctcgataaacagccggcccgctggcgtgagctcgacgtcccggtggcgccgcacaaacaacggcaccgccagccattcctcgatctgacgcaccgtatagctgatggccgacggcacccggtgcagttcctgggcagcggcgctgaagctgccatgacgcgctactgcgtcgacaacgtccagcgaatattcagaccacatggcggctgccttcaaatttattgataagagtgcccaattattatcgcttcacaccaaaactgtcagcttcataatgggcggcagtcagcaaatagtttgatggcaaggtcaacaaggcttcaatgaaaaattcttttggtttcactgcgtatctggcggggctgagcatgctcggttacctcgccatggacatgtatctgccggcgttcggcgccatgggcgagcaattgcagattggcgcaggcgcggtgggcgccagcttgagtatcttcctcgccggctttgcggtcgggcagttgttgtgggggccgttgtccgaccgcctggggcgcaagccgatcctgctcgccgggctgagcctgtttgtgctcggttgtgcgggcatgttctgggtcgaaacggcgccgcaactgctggcattgcgttttatccaggccattggcgtgtgcgctgccgccgtcagctggcaggcgctggtgatcgaccgctacccggccgacaaggctcaccgcgtgttcgccagcatcatgccgctgatgtcgttgtcaccggctttagcgccgctgttgggcgcgctggtgctgaatcacttcggctggcaggcgatctttggcgtattgctgggggtgtcgttgttgctgctgttgccgacgttgttcctgcgtactgcgcaaaaacgtcaggcagcgaagggtgaaccttcgcgcctgggttatgggcagttactgacgtctcgcgtgttcaccggcaatgtcatgatttttgccgcgtgctcggccagtttctttgcctggctgacggcgtcgcccttcatcctgggcggcatgggctacagcccgaatgacatcggcctgagctacgtgctgcccaccttggcgttcctggtcggcggttacagctgccgcagcgccttgcagcacttccagggcaaggcgctgttgccgtggctgctgctggcgtattgcatcagcatggtggcgttgtacttggtcgccactttgactgcgccgaccctcaccaccttgctgattccgttctgcctgatggcgctgtgcaacggtgccagttaccccatcgtcgtggcgaatgcgctgatgccgtttgcggaaaactccggcaaggcggcggcgctgcaaaatacgctgcaattgggcctgtgctttctcagcagcttgttggtgtcatcgatgatcgaccaaccgctgctgattaccgtgatcgtgatgctggcgaccgcgccgttggcggtattgggttactggctggcacggcccaaggccgatgattcggaactggcagccgcctagaacgtcacttccaggttcaccgtcggcgttgatgtgcggctgccccggccgccatccacgccgaatttgttatgccaatactcgtaacccacccccaggtacaggttcggcttcacgcttttgcccggtcgcaccgccaccatcagcgcggtgcgcatcagggcttccggcgcggtgtcgcgaccgtgatagtcctcgcctttttccccgacataattgataaaaccctggaatttcgccgcatggttggcgatctcgaacgggcgcatccatgtcagattgagcatgtaggtatcgtcgaaggtgtggttcgactcctgcgcgccggggatgccggtgtggttcctttccttgtagtacagcaggctcaggtccagcacgccgacggtgttgaacttcaaggtcgggccgatcaccagggcgcgcttcttggctgaggcgaagttgttgttgcggttggcatcgaaacccaacgtcagcgcgtaatccttgaccaggccgctgcccagcggcacatcgaacacccgcgacgcatacaactggtggcggtatacgacatacacctcactcccgccatgatccgtacccttgcgcgggtcgcggctgtcggacaggaacacatcgaggttgaggaagttgctgccataccggtagccgctggcgtgggtgaagctgtagatgcgcttgctgaattcgtcgggattgttcgggttggtgaactgctgaccgtagcgaaaccctacgctgttgttcatccattccaccgcgacggcctccccgccgccgaggagggtgagtgcgacggttgcgccctgtagtgcctttttcattgttatgggtcctttggcgttctggctcatcacggccggattgtttttgtaacgccgatggagggtaacttgttcgattgattgtatacaactctatggacatccagtccgaacattgcatacagtgaccgcacaacaaaaacagagaacccctcaccatgactatcccgaaggcgtcaccgcagcggccagaagatgagaatctcggcgtcgccgccaacatggcttacggcctgcaacatgtgctcaccatgtacggcggcatcgtcgcggtaccgttgatcgtcggccaggcggcaggtttgtcgccggcggatatcggcctgctgatcgccgcgtcgctgtttgccggtggcctggccacgctgttgcagaccctgggcctgccgtttttcggctgccagttgccgctggtgcagggcgtatcgttcgccggtgtggcgaccatggtggcgattgtcggcagtgatggcgccggcggtgtgccggcgattctcggcgcggtgatggccgcgtcgtttattggtttattgataaccccggtgttctcgcggatcaccaagtttttcccgccgctggtgacgggtattgtgatcaccaccatcggcctgaccctgatgcccgttgcggcgcgctgggccatgggcggcaatagccgcgctgcagatttcggcagcatgtccaatatcggcctggcagcgttgaccctggtactggtgttgctgctgagcaagatcggcagcgcgaccatctcacgcttgtcgatcctgctggcgatggtgatcggcaccgtgattgcggtgttcctcggcatggccgacttctccggggtgacccaggggccgatgttcggtttccccacacccttccatttcggcatgcccacctttcacgtggccgcgatcatttccatgtgcatcgtggtgatggtgaccctggtcgagacctcggcggatatcctggcggtgggtgaaatcatcgacaccaaggtcgattccaaacgcctgggcaacggcctgcgcgccgatatgctgtcgagcatggttgcgccgatcttcggttcgttcacccagagcgccttcgcccagaacgtcgggctggtggcggtgaccggggtcaagagccgcttcgtggtggccacgggcgggctgttcctggtgatcctcggcttgttgcccttcatgggccgggtcatcgcggcggtgcccacttcagtgctgggcggggccggtattgtgctgttcggtaccgtggcggccagtggtatccgcaccttgtccaaggtcgattaccgcaacaacatgaacctgatcatcgtggccacttccatcggctttggcatgatcccgattgcggcaccgagcttctacgatcacttcccgagctggttcgcgactattttccactcggggatcagctcatcggcaatcatggcgatcctgctgaacctggcgttcaaccatttcaccgccggtaactcggaccagcagtcggtatttgtggcggggaccgagcgtagcttgtgctttcgcgatgtgtcggaactgcgtgatggggattacttcaagggcggcaagttgtttgatgcgcagggcagggaaatcccgttggtggcggaagtgtcgaagaaggccgcaaagcctcaaaccactgaggtctgaatgtgggagggggcttgcccccgatagcggtgtgtcagcaaccaatcacttagctgatccaccgtcatcgggggcaagccccctcccacaattggaatgcatccagcttgagcattcagccggccttgagcactttgtattttgctgaacacacctcatccagaaacttcaccacagtccccatgcacgcctggcgttcttccacatggggcatatgactggagtcttcaaacagcgcccagcgcacatcggcgatttcatccaggaacggcttgaccaccagcggcgtggcctcgtcgtgccggcctgagatcaccagggtcggtacattgatcgccgacaggcggccagtggatttccagtctttcaagctgccgatcacatggaattcggtcgggccgctcatggcgtggtacaccgtcggatcggcatcgaccgcggcgaaggtgcgtgccacttcctcgggccacgggatgacccggcacacgtgatggtcatagaacacccgcgatgcggcgaggtattccgggtcctggtagttgccggcggtttcgtgcttgagcagggtttcatgcacgccttcaggcaataatttgcgcaggcggttggcttcgctgacccaggtgcgcatgcacgtcggcgagttggccgggatgaacgcacgcaggcccttgggttgcaggatcgcgtgttcactgccgagcatgccgccccaggactgaccgaggatcgcgtagttatcgctgatctgcaggtggtccagcaggttgttcagctcttcgagaaacaggcctacggtccagaaggatggacctttgtcgggcagatgagtggagcggccgttgcccagttggtcgtagtggatcacggcgtggccgctggcggcgacatccttgaacgcgtcaacataatcgtgggtacatccggggccgccgtggataaccaccaggggcgtgcgaccgctggagaggtcaccggtgacgcggtaccaggtttggtaggcgccaaacgccgcatacccttcgcggattttttcgatgaattccatttcgtgccctgctctgaaaaaaggatcggggacacgataatgggtgaaagaaatttaagtaactagcaaaacagctaggttttgcccggcggtcaatcgtcgagcaggcggtaatgggtggcgcgcaccaccgcttgcacgcggttcttggcccccagcttgtgcatcgccgaggccaggtgcagggtgaccaccgccagggaacggctcagttgtgtggcaatttcggccgcagtcatgccgtcggcggcccatttgaggcactcgcgttcgcgtttggtcaggtgaatgtgcgggtaagtgcgtagctctttgctgaacagcgggtaggccgcttcctgcaaggcatgggaaatcaggccgaagtccgacagggtctgctgcgcatcctgcagcacgttgcgagcactgccggtacgcagcccggtcagcgaggcaaaaccaccacggggcaggtggatcggcacgctgacgccgcaggtcaattgctggtcatgcaggtaggatgaaaccggcgcatggcagggatcgatgatcttttgcagcggggtgtcggccttgacgtcgtaggaccagacgaacggcgacacccggctcagggccagatgttgtaccgggtcaatctggtagaacccttcgctgcaccacaaggcatgccagtcgggcggggtgttgcgcagttgcagcaccgaaggggtgatcaatgcaccatcctggtcgatcggcaccggggtgtagtcgtacaccaaggcgtcgaagcccagttgctgggcgaggataaaggtgttgtccatctgctcgtccaggctcctgcccggcatcagacggtgatttaaggcagtcagcttggccagcatccgttctgctcccgaattcgtttgaatctcgacttgctgcaagtagaatgccacgccccggcgaaggactgccaggccaaacctataagaaatgctaggttatggacgcgcggcatcctcggtagtgttggcctgataaacggcccgctacctgccaggccgacactacacaaggaaagtatgcatgtggcgtgaaattgcccccgaccagcagtacaacgtgcaagtcgatggccataacctcgtggtctacagcttcggcgaaggcgatgaggtgctgctatgcctcaacggcgggccgggcctgccgtgtgactacttgcgcgacgcccatggctggctcaaggaccataacctgcgagtggttgcattcgaccagcttggcacgggcgcatcagccagacccactgatatttccctgtgggaaatccgccgttatgtcgaagaagtcgaaactgtgcgccaggccctgggcctgggccgtgtgcatttgctcgggcattcctggggcggctggctcggtatcgaatacgccatccattaccccgacgcactgaaaagcctgatcctcgaaaacaccgtcggcgacattccgcacctgtcccaggagctggagcgcctgcgcggcgccctcggcagcgaaaccgtggccatgatgcaacgccacgaggccatgggcaccctcgaccacccgcaataccaggcggcgatcaccttgctcaactaccgccacgtgtgccgcctcgatgaatggcccgagccggtcaagcgttcccttggcgactggaacatgggcccctacgaaaccatgcaggggcccaacgaattcctctacatcggtaacctcaaggactggaaccgcatccccgagatggccgaattcaagatgccgatcctgatcaccaccggccagcacgacgaactcaccccggcctgcgccatgcgcatgaaaatggcggcccgacacgccgaattgcatgtgttccccaacagcagccatatgcctttttacgaggagccccaggcgtatttcccggtgttgctggacttccttgctcgtcaccgaggctgacggatgaacctggcgcgttatcgttttgtgctgtcccggccgctgcagttgctgccggtgctgtttggcatcagcctgatcacctttgtgctggtgcgctcgatccctggcgacccggcgcgcgccttgctgggctcgcgcagcacaccggatgccttgctgaagatccgcgcccagtacggcctcgaccagccgttgtggctgcaatatttctacttcctcaagaacttgctgaagggcgacctcggccaatcgctgctgtacaaggtcgacgctctcaagctgattgtcacgcgcatcgagcccaccctggtgctggtactgggcagcgtggtgctggcgctgctgattgcggtgccgctggcgacgtgggccgcacgcaacaagggcggctgggcggacaacctgatccgcgtgttcaccacggttggcctgggcatgccggcgttctggctcggcttgatgctgatcctgttgctgagtgtgcagtggggcttgtttccggtgtccggctacggccgcacctggctggacaaggcgcatcacatggtgctgccgtgcctgacgattgccctggcgctgtcggcggtgctggtgcgcaacctgcgggcgagcatgctgatggagttgcaggccgatcacgtgaccgcggcccgcgcccgtgggctgtcggaaaccgccgtttttcgtcggcatgtgttgccaaattccctggtgccggcggtcaacctgctggcggtgaacatcggctggctgatcagtggcacggtggtgatcgaaagcctgttcgccatccccggcatcggccaattgctggtgcgcgggatcttcacccgcgattacatggtggtgcagggcgtggccatggtgctggcctgcgcgacggtggtggtcaacttcatcgcggacgtggtgacggtggccctcgacccacgggtgaagatgcaatgagcagccgcccgttgattgccccgtggcgcatgcgcctgcgcttcggctttcgcaatggccggctgacggcggcgtggggcctgttgattctgctggtatggctggcgcttgcgctatttgcgccgtggattgcgccgtatgacccgatcgcgcagaacactgatttcagtttgctcggtccgagtcttgcgcatccgtttggtacggataactacggtagggacatcctttcgagagtgatctggggcgcgcgcatcgacctgcaactggcgattgtcggggtgatcttccccttcatgatcggcaccttcatcggtgcggtctcgggctatatcggcgggcgtttcgacagtttttgcatgcgcgtgatcgacgtgatcctggcgtttccgttcctggtgctgatgctggcgatcatggcgattcttgggccgggcttgaagagtttctatatcgccatggcgctggtcggctgggtgtcgtatgcgcggctgatccgctcgcagatcctggtgctcaaggaaagcgagtttgccctggccgccaagagcctgggctttggccatgggcgcattctgttccggcatctgctgcccaatgcgatgttcggctcgattgtgttttccatgtcggacgcggtgctggtgctgctcaatggcgctgccgtgagctacctgggcctgggcgtgcaaccgccgaccgccgagtggggcaccatggtggccgaggggcaggcctttatcaccacggcctggtggatctgcacctttccggggctggccatcgtgaccctggccatgggcttcagcctgctggccgatggcgtagcgcaagtgttgggggatcgctcatgagcctgctgcaagtgcgcgacctcagtgtcatcgccaacaatgccgggcgcgatgtaaccctggtcgatcgggtgtcgttcgacttggctgaaggcgaaatcctcggcctggtaggggagagcggttcgggcaagaccatggcctgtcgcggcctgatgcgcctgctgccatcgcccagcctgcgcgtgcaaggcggcgcggtgcggctggccggtcaggatttgttggccttggatgacgctggaatgcgcgccgtgcgcggcggccaactgggcatgatcttccagaatcccagcagccacctcgacccgctgatgcgtatcggcgagcagattgccgaaggcattcgactgcatcaaggcgcgtcaaaaaaagacgcacgattgctggctatcgacgtgctgcgccaggttggcatccccgatccccaggcacgggtcgacaactacccccacgagttttccggcggcatgcgtcagcgcgcaatgatcgccgtggccctgggctgcaaccccaaagtattgatcgccgacgagccgaccacggccctggatgtgacagtgcaggcgcagatcctgcggttgctgctggacctgcgtgaccagcgcggcctgtcgatcatcatgattacccacgacctcggcgtggtcgcgcaaacctgtgattccatcgccgtgatgtacgccgggcgcctgtgcgagcacggcagcaagtacgacttgctggctcgaccccggcacccttacaccgccgggctgatcgattgccagcccgcccacagcagcggccacgccttgctgcgcacgatccccgggcagccgccgctgctggacgcattgcccgccggttgccgcttcaacccgcgctgcccgcaggtcggggcgttgtgcaccgaggtgttgccgcaaggtgctcgggtcgcctgtcattacccgttgggagcgcagccatgagcctgttgcagatcaaggaccttgaggtgaagtttgccgcgtccggcaccggcctgttcggcttgaacaagcagtgggtgagggcggtgaacggcgtgtcgctgaacctggccgccggtgaaaccctggggttggtgggcgagtccggcagtggcaaaagcacactgggccgcgccatcctgcacctcaacccgatcagcgccggccaggtgttgtttgatggcatcgacatggcccatggcagcgccatcgacatcactcgtctacggcatgaaaccgcaatgatcttccaggacccgtacgccgcgctgaacccgcgccacaccatcggtgaaaccatcgccgaggtgctgcgcgtgcagcgcaaagtcgcgccagagcagattcgcgcgcgcgtgaatgaactgctcgacctggtcggcctgcgccccgaactggccagccgcaagccgggctccctcagcggtggccagtgccagcgcgtcggcattgcccgggcgctggcggtggagccacgcctgatcatcgccgatgagtgcgtggcggcgctggatgtgtcgatccagggccagatcatcaacctgctactggaactgcaacagcgcatgaacctggcgatcctgtttatcgcccatgacctggccatcgtgcgccgcctgtgcgaccgcgtggcggtgatgtacctgggcaagatcgtcgaggagggaccggtggaagcggtctttacttcaccgcgtcacccctacacggcggcgttgatccaggcgattcccgagatcgatccgcatcggccgttacctacgcaacctttgccgggtgaaccaccgagcccactgaatttgcccacaggctgcgccttccacccacgttgtcggcatgcccgcgccatgtgttccgtggtgttgccgccaacgcatttcctgcacgagcatcggtacagttgcgtgcttgaagaacctttgctttgacccatccctgccattcatgaacaaggagttatgacatgcaatcgcgccacttgaagttgctcgccgccgccacactgaccgcctggtcgctgactgccggtttcgcgcaggccgccggtgtactgaccatcggctgccgtgaagacagcaccacgtttgacccgatcaaaagcgcgcaaaaccgcgacacctgggtcttcgccaacgtctacgacaccctggttcgcgtcgacaacctgggcaccaagatggagccgggcctggccgaaagctgggatatctccaaggacggcctgacttacaccttcaaactgcgtgacgcaaagttctccgatggctcggccattaccgccgacgatgcggcgttcagcctgctgcgtatccgcgacaacaaggcttcgctgtgggcggatccgttcaacctgatcagcacggccaaggcatcggacccgaaaaccctggtggtcaccttgaagaccccggctgtggccttcctctcgcaactggcgtcgccgacggtgtcgatcctgtcggaaaaagccatgaccaagatgggcgaagacgcctactcggaaaacccggtgacctccggcgcgtttaccgtggatgagtggcgcaagggcgaccgcgtgatcctgaagaagaacccgaacttctggcaggccaagaacgtgagcctggatggtgtggagtgggtatcggtcaccgacgacaacacgcgcatgcgcatggtgcagaacaacgagctggacaccgcgatcttcgtacccttctcgcgggttgaagagctgaagaaagaccagaacgtggtgatccacgccgacccgtccacccgtgaagatcacttgctgatcaatcatgcccacgggctgctggccaagccggaagtgcgtcaggcgttggacatggccatcgacaaacaatcgctggtgaagaccgccacttacggtcaaggcactgtggcttattcctacattccaaagggctcgctgtaccactacgccaacaacctgcagcgcccgtatgacccgaccgctgccaagaagctgttggagcaggccggtgccaaggacttgaagctcaactacgtggtcaatgccggcaacgaggccgacgagcagattgcggtgatcatcaaagaccagttggccaaggtcggtgtgactgccaacctgcaaaaggtcgacccgacccagagctggcagatgctggtggacggtgagtacgatatttcggtgatgtactggaccaacgacatcctcgacccggaccagaagaccaccttcgtgcttggccacgacaccaaccagaactacatgacccgctacaagaacgacaaggtcaaggacctggtggctcaggcgcggatcgaggctgacccggtcaagcgtgagcagatgtatgtggagttgcagaaactggcgaaacaggatgtgaactggatcgacttgtactacagcccgtacatcaacatctcacgcaagaatgtgagcaacttcctgcagaacccgttgggccgcttcaccctcgaagaagtggtgaaaaactaaaccacactgctgaaaaatgtgggagggggcttgcccccgatagcggtgggacagtcactgtatctgttgactgatccactgcaatcggggggcaagcccctcccacatttggttttacaatgtgccggttattgcgcgtcgaacgcctggccgttgatgccggtactgtccggccccatcaggtacaggtacaccggcatgatctcttccggagcaggccgctccatcgggttttccccgggatacgcctgggcgcgcatgctggtgcgcgtgccgcctgggttgatgctgttggagcgtactgctgccacatcctcaagctcatcagccaaggtttgcatcaagccttcggtcgcaaacttcgacacgccataagcgccccagtaagcccgacccttgcgcccgacgctgctggaggtgaacaccaccgacgcatcctgggacaatttgagcagcggcaacaaggtgctggtcagcatgaacatcgcgttgacgttcacgtgcatcacccgcatgaagttctcgccggacaactgttcgagcggcgtgcgcgggccgatgatcgaggcgttgtggagcaggccgtcgaggtggccgaattccttttcgatcatcgcggccagctcatcgtattgatggggcagggcggtctccaggttgaaggggatcaccaccggttgcggctggcctgcggcttcgatttcgtcatacacctgggccaggttggcttcggtcttgcccagcagcagtacggtagcgccgtgggcggcataggttttcgccgccgcggcgccgatcccgcgaccggcgccggtgaccaggatcacccggcctttgagcagttctggacgtgcggagtaatcaaacataaatagcctcgacagaattcagcagcttatgaaccccaactccgaaaacactgaagatccccagtgggagggggcttgcccccgatgagggcctatcagtccgataggtgcgggctggcacaccgctatcgggggcaagccccctcccacattggatcttcatagagggtgggggcgttgagtaatcagcaactgcacagtgcgttatcgagcaccttgcgcagttccagcgggtgatccaccaccacatcggcgccccaatggcgtgggttgtcgtccgggtggatgtagccgtaagtgaccgccgcggtgcgggtgccggcgtcgcggccggactcgatgtcgcgcaggtcgtcgcccacgaacagcacgctggccgggtccaggccgagcatcttgcaggccaggatcatcggctccgggtccggcttgctgtttttcacgtggtccgggcagatcagcagtgccgagcgttcggccaggccgagttgctgcatgatcggttcggcaaaacgcaggggcttgttggtgaccacgccccagaccagcttggacttctcgatgtcatccagcagctcggccatgccgtcgaacaacttgctgtgcaccgcgcagcccttgaggtagcgctcgaggaattcctggcgcagttcttcaaagcctggcgattccgggtccatcgagaaggtcaccgccaccattgcccgcgcaccgccggagatttcatcgcggatgtgctgcgggttgatcggcggcaggtcgcggtcggcgcgcatggcctggcagatggcgataaagtccggcgcggtatccagcagggtaccgtccatgtcgaagagaaccgctcgcaacttcacaggctcactcctcgcgcagggtctggatcatgtagttgacgtccacatcgttggccagcttgtagtgcttggtcagcgggttgtaggtcaggccgatgatgtccttgacggtcagcccggcctggcggctccacgcacccagctcggagggacggatgaatttcttgaagtcatgggtgccgcgcggcagcagcttcatgatgtattcggcgccgatgatcgcgaacaggtaggccttggggttgcggttgatggtggagaagaacacctggccgccgggcttgaccatgcggaagcaggcgcggatcaccgaggacgggtccggtacgtgctccagcatttccaggcaggtgaccacgtcgaactgctcgggcatctcttcggccagggcttcggcggtgatctggcggtattccacgctcaccccggactccaactggtgcaactgggccacggccaagggcgcttcgcccatgtcgatacccatcacggtcgcgccgcgttgggccatggcttcgctgaggatgccgccgccgcaaccgacgtccagtaccttcttgccggccaggttgacgcgctcgtcaatccagttgacccgcagcgggttgatgtcgtgcaaaggcttgaactcgctttcgcggtcccaccagcggtgagccagggcttcgaatttggcgatttcggcgtggtcgacgttgctcatggtgaatcctctaaatctgataaatcggtttgtcagtcttgaacgccggggttcaagaccttcgttattcgctgtgcccgctgatgcgttggccccaggcgatggccgtggtggtcaactggtgttcatccatgcgggtcaattgccggtcgtcgagcaattgcttgccggcgacccaaaggtgtttcacgcaatcgcgtccggtggcatatataagctgtgagaccggatcatagatcggttgttgcgccagccccgacagatcgaaagcaacgatatccgccgccttgccgacttccagcgagccgatctcactttccaggcccatggcccgcgcgccattgagggtggccatgcgcagggcgcgatgggcatcgagtgcggtggccgaaccggcgacggccttggccagcatcgccgccgtgcgggtttcgcccaacaggtcgaggtcattgttgctggcggcgccatcggtgccgatggccacattcacgccagcctgccacagacgctccaccgggcaaaagccgctggccagtttcaggttggattccgggcaatggatgacgctggtgttgctttctaccagcaaagccaggtcgtcctcgctgatttgggtcatatgaacggcctggaagcgcgggcccagcagccccaggcgacccaggcgtgccagcgggcgctcgccggtctgctcgaccgcttgctgcacttcgaaggcggtttcgtgaacatgcatatggatcgcggcgtccagttcttcggcgatcacccggattttttccaggttgtcatcgcacaccgtgtagggcgcgtgtgggccgaaggtgatcttgatgcgcgggtggtgcttgaggtcgccgaacagctcgacaccttggcgaatcgcctcgtcggcgctgccggcgccggggatcgggaagtcgaggatcggaatcgcgatctgcgcgcgcatgccgctgttgtgcacgcaatcgctggcgaccttggggtagaagtacatgtcggagaagcaggtgatgccgcccttgagctgttcggcgatggccaggtcggtgccgtcgcgtacgaaggcttcatcgacccacttggcttcggcgggccagatgtgtttttccagccaggtcatcagcggcaggtcatcggccaggccgcgaaacaggctcatcgcggcgtgcccgtgggcgttgaccaggccggggctgagcagcatgcccggcagttcgcgggtctccttggcggtcagtttcaacgccgcctggcgagtcccgataaaggcaatgcgcccatcgcggatgcccaggccatgctccttgagcaccacgccggcgggttcgacaggcaccagccacgtaggcagcaacaataggtcgagcggggcggcagtggcggtcatcgcaggcttcttcccaggcagctataaaagaagggcgaagtatacccgagcgtcctggctggcggatcgctataatcggcggctttgtttatgagtgcggagtaagggatgcgcgatcgactgttggctgcggagaaagtgaaggccatcgattggcgtgatggcgcactgtacctgctcgatcagcgtgccttgccgtcccgggaaagctgggtggcctgcgtgacggtcgatgaagtggctgcagccattcgctcgatggtagtgcgcggtgcgccggccatcggcatcagcgccgcatatggcctggtgctggccgcccgtgagcggatcgccgaaggcggtgactggcaggctgcgtgggaagaagactatgcattgttggccgatgcccgacccaccgcgtcgaacctgttctgggcgttgaagcgcatgcgtgatcgcctggatcgtgtgaaaaagcacgccgacccgctggcggtgctggaggcggaagccattgctatccatgaaagtgaccgcgaggccaacctgaccatggcccagctcggcgtcgagctgatccgcaagcaccagggcaacgcccaggccatcctcacccacggcaacgcgggagccctggcgaccggcggtgtcggtacggcactcggggtgattcgcgcggcttacctcgaaggcatggtcgagcaggtctacgccaatgaaacccggccctggctgcaaggttcgcggctgaccgcctgggagctggcgggcgagggcatcccggtgacggtgaatgccgactcggccggtgcgcatatcctcaagaccaaaggcgtgacctgggtgatcgtcggcgccgactgcattgccgccaacggtgatgtgatcagcaagatcggcacctaccagttggcggtgtgtgcgatgcaccacggtgtgcgtttcatggtggtggcgccgagttctaccctggacctgatgatggccactggcgatgacgttgccctggaagaacgtgatgccggtgagttgctggaagtcgccggccagcgcttcgcagcggatgtggcggccttcaatccggtgttcgacgtgaccccggctgacctgatcgatgtgatcgtgaccgaaaaaggcgtggtcgaacgaccggacaccgccaagttggccaaattgatgtgccgtaaacgcttgcattaagccaatttgccgccgaaatcgggcttggatccagctcagagcccctctcgtcgccctcaagcctgtcatccgtcaacttactatgctccatgcgcatcagggggataggtgcgtggcggcgattgtgataacatccggcggtttccagggctgccccgaggggcggcctataacgtgcagatccgtgtcataactcgttgatttgtcgtaagtcgttgtcaggcactctgccggcagcggcgagcttcgttcgtcccatatggatgtgacgaggtttcacccgaaaaaggaatcaggcttctcatgggcgaactggccaaagaaatcctcccggtcaatatcgaagacgagctgaaacagtcctacctcgactacgcgatgagcgtaattgtcggtcgggcactgcctgatgcgcgcgatggcttgaagcccgtgcaccggcgtgtgctgttcgcgatgagcgagctgggtaacgactggaacaagccgtacaagaaatctgcccgtgttgtcggtgacgtgatcggtaagtatcaccctcacggcgacactgcggtgtacgacaccatcgttcggatggcccagccgttttccctgcgctacctgctggtagacggccagggcaacttcggttcggtcgacggcgacaacgccgcggccatgcgatacaccgaagtgcgcatgaccaagctggcgcatgagctgctggccgacctgcataaagaaaccgtggactgggtgccgaactacgacggcaccgaaatgatcccggccgtcatgccgaccaagatccccaacctgctggtcaacggttccagcggtatcgccgtgggcatggcgaccaacatcccgccgcacaacctcggtgaagtcatcgacggttgcctggccctcatcgacaaccccgagctgaccgtcgatgagctgatgcaatacatccccggcccggactttccgaccgctgcgatcatcaacggtcgcgccggcatcatcgaagcctaccgtaccggtcgcggccgcatttacatgcgcgcccgctcgatcatcgaagacatcgacaaggtcggtggccgccagcagatcgtcatcaccgagctgccttaccagctgaacaaggcgcgcctgatcgagaagatcgccgagctggtcaaagagaagaagctcgaaggcatcaccgagctgcgcgacgagtccgacaaagacggtatgcgcgtggtgatcgagctgcgtcgtggcgaagtgcctgaggtgatcctcaacaacctctacgcccagacccagctgcaaagcgtgtttggtatcaacgtggttgcactgatcgatggccgcccgcgcatcctgaacctcaaggacctgctggaagccttcgtgcgtcaccgccgcgaagtggtcacccgccgtaccgtgttcgaactgcgcaaggcccgcgaacgcggccacatcctggaaggccaggcagttgcgctgtcgaacatcgacccggtgatcgccctgatcaaggcctcgccaaccccgtcggaagccaaagaggcgctgatcagcaccccttgggaatccagcgccgtggtggccatggttgaacgtgccggcgccgactcgtgccgtccggagaccctggacccgcaatacggtctgcgcgaaggcaagtacttcctgtcgccggaacaggcccaggccatcctggaactgcgcctgcaccgcctgaccggcctggagcacgagaagctgctggccgagtaccaggagatcctcaaccagatcggcgagttgatccgcatcctcagcagcgccgtgcgcctgatggaagtgatccgcgaagaactggaagtgatccgcgccgaatacggcgatgtgcgccgcaccgagattctcgatgcacgcctcgacctgaccctgggtgacatgatcccggaagaagagcgtgtagtgaccatctcccacggtggctacgccaagacccagccgctggctgcgtaccaggcccagcgtcgtggcggtaaaggcaagtcggctaccggcgtgaaggatgaggactacatcgcccacctgctggtcgccaacagccacaccacgctgctgctgttctccagcaagggcaaggtgtactggctcaagacctacgaaatcccggaagcgtcccgtgctgcccgtggtcgcccactggtcaacctgctgccgctggacagtgatgaatacatcaccaccatgctgccggtcgaggaatacaccgaaggtcacttcatcttcatggccaccgccaaaggcaccgtgaagaagaccccgctggaatccttcagccgccagcgcagcgtgggcctgatcgctctggagctggacgaaggcgacgtactgatctccgctgccatcaccgacggcgagcgtgaagtcatgctgttctccgacggcggtaaagtaacgcgcttcaaggaatccgacgtgcgcgccatgggccgtaccgcccgcggtgtgcgcggcatgcgcctgccagaagggcagaagctgatttcgatgctgatcccggaagaaggcagccagatcctcaccgcctccgagcgtggttatggcaagcgcaccgccatcagcgagttcccggagtacaagcgtggcggccagggcgtgatcgccatggtcagcaacgaccgcaacggccgtctggtcggcgcggtgcaggtgctcgacggcgaggaaatcatgctgatctccgaccagggcaccctggtacgtacccgtgtggctgaagtgtcgagcctgggccgtaacacccagggcgtgaccctgatcaagctggccaaggacgaaaaactggttggcctggagcgtgtccaggagccatcggaagtcgaaggcgaagagctggaaggtgaggagtttgagggcgaggtgatcgcagcaggcgataacaacgtcgacgagccaaccctcgacgctgccgcagacgaagaagaaccgcaggaataagcggacacacagggggcggatgaagattcgcccccttgttgtttgtcccttatgaaataacacgtcctttggctggacgcggtcaatgtgggagctggcttgcctgcgatggcagcgccgcggtatcactgcgctaccgaggtgcccctatcgcaggcaagccagctcccacaagggttcgctccagagaaaggttgttaccgaacatgattgcagccccaccagatcagagtgagattggatgtgagcaagagagcctataacttctgtgccggtcccgcggcgcttcctgaagcagtcctgcagcgtgcgcagggtgaactcctcgactggcatggaaaaggcctctctgtgatggaaatgagccatcgcagcgatgagttcgtgtctatcgccaccaaggccgagcaggacctgcgcgacttgctggacatcccatccaactacaaggtgctgttcctgcaaggtggcgccagccagcagttcgcccagatcccgctgaacctgctgccggaagacggcactgccgactatatcgacaccggtatctgggggcagaaggctattgaagaggcctcgcgttacggtcacgtcaatgtggcaggcaccgccaagccttacgactacttcgccattccgggtcagaacgagtggaagctgtcgagggacgctgcctacgtgcactacgtggccaacgaaaccattggcggcctggaattcgactgggtaccggaagtgggcgacgtgccgctggtgtgcgacatgtcctcggacatcctgtcgcgcccgatcgacgtgtccaagtacggcatgatctacgccggcgcccagaagaacatcggtccgagcggcatcctggtcaacatcatccgcgaagacctgctgggtcgtgcgcgatcgctgtgcccgaccatgctcaactacaaggtcgcggccgataacggctcgatgtacaacaccccgccggcgttcgcctggtacctgtccggcctggtgttcgagtggctgaaagagcagggcggtgtcgccgccatgggcaagctcaacgaagtgaagaagcgcaccctgtacgacttcatcgacgccagcggtctgtacagcaacccgatcaacctgaccgaccgctcgtggatgaacgtgccgttccgcctggctgacgaccgcctggacaagccattcctggccggtgccgacgaacgcggcctgctgaacctcaagggtcaccgctcggtgggtggcatgcgcgcctccatctacaacgccgtcgacatccacgcgatcaacgcgctggttgcctacatggcagagttcgaaaaggaacacggctaatgtctgagcaagaactcaaggccctgcgcgtacgcatcgacagcctggacgagaaagtcctggagctgatcagtgagcgtgcgcggtgcgcccaggaagtggcacgggtgaagatggcatccctggccgaaggcgaagtgccggtgttctaccgtcccgagcgtgaagcccaggtgctcaagcgcgtgatggagcgcaacaagggcccgttgggcaacgaggagatggcgcggttgttccgtgaaatcatgtcttcgtgcctggcgctggagcagccgctgaaagtggcgtacctcggcccggaaggcaccttcacccaggcggcggccatgaagcacttcggccacgccgtgatcagcaagccaatggcggccattgacgaagtgttccgtgaagtggcggccggtgcggtgaactttggcgtggttccggtggaaaactccaccgaaggcgcggtcaaccacacgctggacagcttcctcgaacacgacatggtgatctgcggcgaagtcgagctgcgcatccaccaccacctgctggtgggcgagaacaccaagactgacagcatcagccgcatctactcccacgcgcagtcgctggcccagtgccgcaaatggctggatgcgcattacccgaatgtcgagcgcgtggcggtctccagcaacgccgaagccgccaagcgggtcaagggtgagtggaactcggcggccatcgccggtgatatggcggcgggcctgtacggcctgacgcggctggccgagaaaatcgaggatcgcccggacaactccacgcgcttcctgatgatcggtagccaggaagtaccgccgaccggtgacgacaagacctcgatcatcgtgtccatgagcaacaagcctggcgcgctgcatgagctgctggtgccgttccacgacaacgggattgacctgacgcgcatcgagactcgtccttcgcgcagcggtaaatggacttacgtgttctttatcgacttcatcggccatcaccgcgacccactggtcaagggcgtgctcgagaaaatcagtcaggaagccgtggcactcaaggtgctgggctcttacccgaaagcggttttgtgaggcgttaacatgagtggcaacttcctcgccctggcgcagccgggcgtgcaacaactgtcgccttacgttccgggcaagcctgtggatgagctggcgcgtgagttgaacctggatccttcgaaaatcgtcaagctggcgagcaacgagaatccgcttggtcccagccccaaggtattggcagcgattcgtgaagagctggctgagctgacccggtatccggacggcaacggcttcgcgctcaagtcgctgctggcggaaaagtgccgggtcgagctgaaccaggtgaccctgggcaacggttccaacgacattcttgaactggtcggccgtgcctacctggcaccgggcttgaacgcggtgttcagcgagcacgcgtttgcggtctatccgatcgtgacccaggccgtcggtgccgatgcgcgcatcattccggcgaaagattggggtcacgacctgccagccatgctggcggccatcgacgcccagacccgcgtggtgttcatcgccaacccgaacaacccgaccggcacctggttcgacgcccaggcgctgaacgatttcctgcaagacgtgccggaacacgtgctggtggtgctggacgaggcctatatcgagtatgccgaaggcagcgacctgccggacggcctggatttcctggccgcgtacccgaacctgctggtgtcgcgcaccttctccaaggcctacggcctggcgtcgttgcgcgtgggctacggcttgtccagtgcggtggtcgccgatgtgctgaaccgcgtgcgccagccgttcaacgtcaacagcctggccctggcggcggcctgtgcggcggtgaaggatgcagagtatctggaagagggtcgccgcatcaacgaaagcggcatggtgcagttgcaggaaggcttccgcgaactgggcctgggctggattccgtccaagggcaactttatctgcgtcgatctcggccaggtggctgccccggtgttccaggggctgttgcgcgaaggcgtgatcgtgcgtccggtggccaactacgggatgccgaaccacctgcgcatcaccatcggtctgccggctgaaaacagccgcttcctggaggcgctggccaaggttctggctcgtggttgatgtcactgcattgcaacctgctgtgcctatgatcggtcgcctggtggtggtcggtctggggttgatcggtggctccttcgccaaaggcctgcgtgaaagcgggctgtgtggcgaagtggtcggtgtggacctggacccgcaatcgcgtcagttggcggtcgagttgggcgtggtggatcgctgtgaagcggacctagcgctcgcgtgccagggcgctgacgtgatccaactggccgtacctatcctggccatggagaaattgctcgccgtgttggcgggcatggacctgggccaggcgatcctcacggacgtcggcagtgccaagggcaatgtggtgcgcgcggcgcaacaggcgtttggtggcatgccgacgcgtttcgtgccgggccatccgattgctggttcggagcaaagcggggtggaggcgtcgaatgcgcagctgttccgtcgccacaaagtgatcctgacgccgcttgcgcaaaccgatccggcggcgctggcggtggtggatcgcctgtggcgcgagttgggtgcggacgtcgagcacatgcaggtcgagcgccatgacgaagtgctggccgcgaccagccatctgccgcatttgctcgcatttggcctggtggactcgctggccaagcgcaacgagaacctcgagattttccgttacgccgccggtggcttccgcgacttcacgcggattgccggcagcgacccggtgatgtggcacgacatcttcctcgccaatcgcgaagcggtgttgcgcaccctggacaccttccgcagcgacctcgacgccttgcgcgatgcggtcgacgccggggatggccatcagttattgggcgtgtttacccgtgcgcgggtggcgcgtgagcatttcagcaagatcctggcgcgccgggcctacatggaaaccgctgtgaacgctgatgagctgaccttcctcgccgaacccggtggccgcttgagcgggcgcattcgggtgccgggcgacaagtcgatctcccatcggtcgatcatgttgggttcattggctgaaggcgtgactgaggttgagggtttcctcgaaggcgaggacgcgctggcaactttgcaggcgtttcgcgacatgggcgtggtgattgaagggccgcaccatgggcgcgtgaccatccacggcgtgggtttgcatggcttgaagccggcgccggggccgatctatctcggtaactcgggcacctccatgcgtctgctgtccgggttgctggctgcgcagagcttcgacagcgtgctgacgggcgatgcttccctgtccaagcgcccgatgagtcgcgtggccaagccgctgcgggaaatgggcgcggtgatcgagaccggcccggaggggcgtccgccgctgactatccggggtggtcaggtgctcaaaggtttcgattattcgatgccgatggccagtgcgcaggttaaatcctgcctgttgctggccgggctttacgccgagggcaagacctcggtgaccgagcctgcgccgacccgtgatcataccgagcgcatgttgcgcggttttggttatccggttgatgtggtgggggccaaggcgtcggttgagtctggccatgcgctggttgcgacgcatattgaagtgccgggggatatttcctcgtcggcgtttttcctggtggcggcttcgattgccgaaggctccgagttgttgctggaacatgtgggcgtcaacccgacccgcaccggcgtgatcgacattctgcggctgatgggggcggacattaccctggaaaatccgcgtgaagtgggcggcgaaccggttgctgatctgcgcgtacgtgccgcgacgttgaaaggtattgaaatccccgaggcgctggtgcctttggcgatcgacgagttcccggtgctgttcgtcgcggcggcctgtgccgaagggcggaccgtgttgcgcggcgccgaagagctgcgcgtgaaggagtccgaccgtatccaggtcatggccgatggtctgctggcactgggcgtgaagtgtgaaccgacgcctgatgggattatcattgacggtggcctgatgggcggtggtgaagtgcatgcccatggcgatcaccggattgccatggcattcagcgtggcttccctgcgggcggcggcgccgattcgtatccgtgactgcgccaatgttgctacgtcttttccgaactttcttacactgtgtgcccaagtcggcatccgtgttgcccaagaggctcaattgtgaatatcaaagcaccggtgattaccatcgacgggccaagtggctcgggcaaaggcacgatcgccggcatcctggccaagcgcctgggctggtgcctgctggattccggcgcgctgtaccgcctgctggcattcgccgcacgcaaccatggcgtcgacctgaccaacgaagaatccctgaagctgctggcggcgcaccttgatgtgcagtttgttggcgcgacggaaggtcatccccagcgcataatccttgaaggggatgatgtgaccgatgatctgcgcaatgagcaagtcggctcctgggcctcccaggttgccgcactgccagcggtgcgggacgcattgttgcagcgccagcgggctttccaggagccaccgggcctggtggccgatggccgtgacatgggaaccgtggtgtttcccgaggcgccattgaagattttcctgaccgccagcgccgaggagcgggctcgccgccgctacttgcagttgaagggcaaagtcgatggtgttagtctgtcgagtctgctagatgagatccgtgcacgcgatgagcgtgatacccagcgcgcagtagccccgctcaagccggcggctgatgccatacagctggattccacggagttgtccatcgagcaggtgctggaacgcatcttgagcgagatcgccattcgcgatatcgccgggtgaccaagaaggctgcaggggaccagtcatagtcctgcggtgcttcttttaattgaaactgacccacaccgtctggggtgtggagatgggcgtattcttcgcccttatcaacaggaattaaaatgagcgaaagctttgcggaactctttgaagaaagcctaaaaaccctgaaccttcaggcaggctccatcatcaccggtgttatcgttgatatcgattaccaagctcgctgggtaaccgttcacgctggtctgaagtctgaagctctgatcccgctggaacagttctacaacgatgctggtgatctgacaatcaatgtcggtgacgaagttcacgttgctctggactcggttgaagacggtttcggtgaaaccaagctgtcccgtgaaaaagccaagcgcgctgaatgctggattgttctcgaagcagccttcgcagctgaagaagtggtcaagggcgttatcaacggtaaggttaaaggcggcttcactgtcgacgttaacggcatccgtgcgttcctgccaggttctttggtcgacgttcgtccagtgcgcgacaccacgcacctggaaggcaaagaactcgaattcaaggtcatcaagctcgaccagaagcgcaacaacgttgtcgtttcccgtcgcagcgtcctggaagcagagaactccgccgagcgtgaagctctgctggaatccctgcaggaaggccaacaagtcaaaggtatcgtcaaaaacctcaccgactacggcgcattcgtcgacctgggtggcgtggatggcctgctgcacattaccgacatggcttggaagcgtatcaagcatccttccgaaatcgtcaacgttggcgacgagatcgatgtcaaggttctgaaatacgatcgcgagcgcaaccgtgtttccctgggcctgaagcaactgggtgaagatccatgggttgctatcaaagcccgttacccagaaagcactcgcgttaccgcgcgtgttaccaacctgaccgactacggctgcttcgctgagctggaagaaggcgtggaaggcctggtacacgtttccgaaatggactggaccaacaagaacatccacccttcgaaagtcgtacaagtcggcgacgaagtggaagttatggttctggacatcgacgaagagcgtcgtcgtatctccctgggcatcaagcagtgcaaatctaacccatgggaagatttctctggccagttcaacaagggcgataaaatctccggcaccatcaagtcgatcaccgatttcggtatcttcattggtctggacggcggcatcgacggcctggttcacctgtccgacatctcctggaacgaagtgggcgaagaagctgttcgtcgtttcaagaagggcgacgagctggacaccgttatcctgtcggttgacccagagcgcgagcgtatctccctgggtatcaagcaactggaaagcgacccgttctctgaatacgttcaggacaacgacaaaggcgcaatcgttaaaggcatcgtgaaggaagttgacgctaaaggcgccatcatcactctggccgacgatatcgaagcgactctgaaagcctccgaaatcagccgtgaccgcgttgaagacgcgcgtaacgttctgaaagaaggccaggaagtagaagccaagatcatcagcgttgaccgcaagagccgtgtaatccagctctccatcaagtcgaaagacgatgctgaagagaaagaagccatccagagcttgaaagacaagccttcggatagcatcgctgctggtcctaccactctgggcgacctgttgcgtgcacaaatggaaaaacagaactaagttctgtcagaccataaaaaagggcgacttcggtcgcccttttttgtgcctgaaattcgttgaatcaacaccgagaaccaaggcgtatagcccagtgtcagaactgactatagtcttaagttaaaagcggttcttgtgttgtggcttcagtaaggatttgaatgaacaggcttatcgtagtgctcgcattggtaatgcttgctggttgctcggccaccagcgccaagacccacgccaaacgcggtgtgagtggtatcgaggtagattgctctggcctcggcaacagctggagcaagtgcgaaaaacgcgcggctcgagagtgcaagatgcagggctacaaggtcatcacccgatccagcgatgccagcgacgaagagggtgactatctgttcggttggaaccctgccggggcagtaacccgcactatgctggtcatctgtaattgaggtcggaatacgcctatagccggttgccatctatcctgcggataagttgttcggtgggctgttcaaattcatcaagtcatgctaaaaccttcgaagcgcttttcctagctgcttgaaaaagaagggaaaaatatgacgaagtcggagttgatcgaacgaattgtcacccatcaagggctgctctcatccaaggatgtcgagctggctatcaagaccatgcttgagcaaatgtcccagtgcctggcgaccggggatcggattgagatccgtgggtttgggagcttttcgcttcactatcgcgcaccgcgtgtgggtcgtaatccaaaaaccggccagtccgtcagcctggacggtaagttcgtacctcacttcaagccgggtaaggaattgcgtgatcgggtgaacgaagacgaggaagagggcgtctgatcgactttcaggagaacgttatgctaaaagccaggcgctttgtatcggttgtagctgttttgtttttcgcgctcattgtcgtgacttttgtgttggaaaatcagcaaagtacaaagctgtcatttttcggctggtctaccgttgaactgcctgtttcagtttttacgacgttggctttggtcgtgggaatgatcattgggccagtgctggggttgatagtgggtcgtaagatggctcgacaaaaggcttgatgtcttttcctgcagcatcctgttttctttagcggccgcagcctgagcaggatttgagacgtttatcctgtcatgtatgccatgccctgctggtctagtgaaaaacttgcgcatttgtctgcattaatgctctcgaaaagtcggtctgcgttattctcttgcaccgctcggggcttgcgccccttcccctcaagccgctgccaaggcgccttcttacgcgacatgcatccatgttcgcttttgactttaaggatgcaggccttaaaatggccatcaattttcatccccttcatctttaactgcaccacacaaagcttatttttcgggctgtttgctaacgagcttcgacgttttcctagaacctcttcaccgttgagcattccggggcggcatgttggctttgttggtctgcaggcattgaggtgattggccgactagaagcttgtcgtgctgtgcgcgttgctttaggacttactatgttcagcggaaaaacgcttcttatcaccggtggtaccggttcattcggcaacgccgtcctcaagcgcttcctcgacagtgatattgcagaaatccgcatcttcagccgcgatgagaagaagcaggatgacatgcgcaagcgctatgccgacaccaagctcaagttctatataggcgatgtgcgcgactatcaaagtgtgctcaatgccacgcgtggtgtggactacattttccatgcggccgcactgaagcaggtgccttcctgtgagtttcatcccatggaagcggtcaagaccaacgttatcggcactgagaatgtcctggaagccgctatccagaacgcggtcaagcgagtggtttgcctgagcaccgacaaggctgtctaccctatcaacgccatgggtatctccaaggcgatgatggaaaaggtcatggttgccaaatcccgcaacgtagatgatgccaagaccgttatctgcggtactcgctacggtaacgtcatggcttcgagggggtctgtcattcccctgttcatcgagcagattcgtgcaggtaacgcattgacgttgaccgacccgagtatgactcgcttcatgatgacgctggccgatgctgtggacttggtgctgtatgcttttgagcacggtcgcaacggtgatctttttgttcagaaggcgcctgccgcgacagtcgagaccttggccaaggcactgaccgcaatggtcggccggcctgagcaccctatccaggtcatcggtactcgccatggggaaaagctttttgaagcgttgttgagccgtgaagaaatggcctgcgctgaagacaagggtgattactaccggattccccccgatctgcgtgacttgaactattcaaaatttgtcgagcagggtgaagagaaaatctcccgtacggaagactataactcccataacactgaacggttggatgtggccggcatgcaacggcttctgctcaagcttgaattcatgcaagcgatccagcgtggcgaactcgctacgccggaggaataattgatgaaggtactgatcaccggggccaacggttttgtcggcaagaacctgattgcgcatttgactgagcgcagtgatgtcgaggttgtcgtctttacccgtgacaacagcatcgcccaactgccagcgttggttgccgaggtcgattttgtgttccatctggcgggggtcaaccggccccaatcgtccgatgagttcaaggtgggcaatactgacctgactgtggccctgtgcgacgcgatcaaggcaagtggcaagctcactcctgtgctctacacctcgtcgacccaggctgaccgtgacaatccctacggtgccagcaagctggctgccgagcaggcattgcacgacctgcaggcgagccatggttccagggttcatgtcctgcgcctgcctaatgtgtttggcaagtgggcgcgacctgattacaactccgccgtggcgactttctgccataacatcacccgaggcctgccgatccaggtcaatgatcgacaagcgatggttaacttggtctacatcgacgacgtggtcgagtgttttatccgggtaatggattcgggtttacctcatggcgcggcggctcaggtgagcccaatttacagcattgctgtcggggaactggccgatcaactgcatgcgtttcgcgacagtcgcgaaacgttgatcagcgaagctgttggcacgggcctggtgcgagcactctactcgacctatgtgagctacttgcccgtcgagcaattcacttatgacgttccgaaatacggtgacccgcgcggcgtttttgtcgaaatgctgaagaccaaggacagtgggcagttttcctatttcactgcgcatcccggcatcacacgtggtgggcattatcatcacagcaagaccgagaagtttctggtaatcaaaggcaaggcctgcttccgttttcgccatatcgtatcgggtgagttccatgagttgttcactcaaggtgaacagcctcgggtggtggagacagtgcctggttggactcatgacattaccaatgtcggcgaagacgagatgatcgtcatgctctgggccaacgaggtttttgatcgtgagcggccagacacctttgcgatgccggtgggtactcaagcctgagcatgagcgcatcaggcaatgcatggcgcgaacagctccgatgccaatgattctggaagagtgttgaaatgaaaaagctgaaagttgtcacagtcgttgggactcgtcccgaaatcattcgcttgtcgcgagtgattgccaagctggatgaacactgtgaacacgtcctggtgcataccggccagaactacgattacgaattgaacgagatttttttccaggacctcggtattcgtaagcctgaccattttctcaatgcagcgggcgcgagtggtgcgcaaacgatcggcaatgtgatcattgcggtggaccaggtgctggaggaggtgcagccagaagcccttctgattctcggtgataccaacagctgcatggcggtgattccagccaaacgccgtaaaatcccgacattccacatggaagccggcaaccgctgtttcgacatgcgtgtgcctgaagagatcaatcgccgcatcgttgatcacaccgcagacatcaacctgacctatagcagcatcgcacgtgactacctgctgagcgaaggattgccgccggatcgggtgatcaagaccggtagccctatgtttgaagtgcttaaccattaccgtgatggtatcgaagcctctgaagtgctcgatcgcctcagtcttgaggcgggcaagtttttcgtggtgagtgcccatcgcgaagagaacattgattccgacaaaaacttcctcaagctggtcggcgtgttgaacaccgttgctgcccagtatgacctgccggtgatcgtgaccacacaccctcgtacgcaaaagcgtgtcgatgcgatgggcgtaacctttcacaagaatgtgcaattgctcaagccgctggggttcaaggattacaacaagctgcaactgacggccaaggccgtactgtccgacagcggcaccatcaacgaagagtcatcgatcctgaatttccctgcactgaatctgcgtgaggcccatgaacgaccggaagggatggaggaggcggcggtcatgatggtcggcctggaggttgagcgcgccctgcagggcttgcagctcctggaaagccaggccgctggggcggaacggacgttgcgcttggttgccgattacagcatgccaaatgttgccgaaaaggttgtacggatcatccatagctaccgtgactacgtcatgcgcactgtatggaagcaatattgattggacagcctctccccggaaaaaccactgaagattctggtggtcacccagtatttctggcccgaaaacatgcgtatcaacaacatggtcgaaggctttgtcgccaaaggtcatgaggtgaccgtcctcacgggcgtgcccaactatccggaagggcaagtctttgccgatttccggcgtgaccctgcgcagttttccaattatcggggagcgcgagtgatcagggtgccgatgctggcgcgaggcaagagcaatttcagactggccatgaattacctctcgtttttcagcagtgcctcaatcattggcagttacaagctgcgtggtcaggcgttcgactccatctttgtgtatggcgtgtcgcctatcatgggggcgatcccggcgctgttgcttgggcgcttgaaaagggctccggtacttatatgggtgctggatctttggccggaaagcctcagggcggttggggttatagaaaacccgaagttgcttggactggttggcaaggtggtgtcctggatctacaaccgcactgattacctgttgttgcagtcacgttcgttcgacgagaacgtcaaggagtactgcacacgtgcaattgatgcagaccgactggtgtatttccctagctgggctgaggatgatttttccgcagagctgcaggggccttcggagttgctgcagcgtgacgatgctgtatttacaatccttttcgccggtaacatcggcgatgctcaggattttccagccatcatggcggcagtcaaggctgtcgagaccgatctgcctgtgcgctgggtgattgtgggggatggtcgggcaagccaatggctgaccgagcatgtggcgcaaaaccgcatggacaacgtgctactgcttggcagacatcccttggagaagatgcctgcgttgttcgccgtcgcggacgctttgctggtttcgttgaggacaaatgacgttttcgagaaaaccattccaggcaaagttcaggcttacctggcttctgggaaacctgtaatcgccatgatcgatggtgaagcggccaacgttgttgaaggatcgggtgcgggcatggtgtgtcgttctggcgatgcccaggggttggcgcgtatcgttcgcaccatgggcgtcttacccaagtccgagcttgagagcatgggcctgttgggcaggcgttactaccttgagcatttttccaaggacaccttgttcgatcgtcttgaggcgctatttagaaaagcgaccttgaggcgtaaccaacaatgaccagaaccctttgcccgtctctgtttcaggaattgtttgcgaaatgaccctctggttcgtgtttgccgcagtactcctcgtatcacttttgttgacctgggtactgcgccgctatgctttgtcgcgtagcttgatggacattcccaatggtcgcagctcgcactcggttcccacgccacgaggaggcggggtcgcaatcgtgctgactttcctggtggcgttggtgctcgttgcgctcgctggctgggtcagttggaatgcagcatggccattgctgggggcgggcgcattgatcgccgtggttggctttctcgatgatcacggccatatcgccgcacgttggcgcctgttggcccatttcgccgcagccatttgggcgttatgttggatcggagggctgcccaccatcagtctggccggggttgaattggaccttgggtggttcggtcacgtgctggcggctttgtacctggtctggatgttgaacttgtacaacttcatggatggtatcgacggcattgccagcatcgaggccgtctgcgcctgttcgggagcgtgcctggtgtactggctgacagggcatgaaagtctcatgcttgcgccgatgttactggcagtcgccgtgcttggattcttgtactggaactttcctcccgcgcgcattttcatgggcgatgcgggtagcggcttcctcggtgtcgtaatcggtgtgttgtctctgcaggcggcctgggcggcccctcagatgctgtgggtctggctgattttgctgggtgtgttcgtggttgatgccacctttaccttggggcgacgcctgttgcgcggggataaggtctatgaagcgcatcgcagtcatgcttatcagtatgcctcgcgccaggccgggcgccacttgccggtgacgctgacggtgatggcgatcaatctattgtggctgctgcccatcgctcttttcgttggccttggttttgacggtgttcttgggctggtggtggcgtatgttccgcttgtagggctggcgatcaagtttcacgcgggcgagttggaaaaagtgtgatcattggttgacgctggtgtttgaaaaggttgctgcacacgtacgtgactgccattttttgctggcagcgctagggactgaggtataaaaagggtttatggatagtctacgtgcccgattggtgggcttgccgcgcaggcaaaaacgtttcttgcaagtagtgaccgacatcgtcctggtgtggggagcactgtggctggcatttgtcgttcgcctggggtttgatgatcttaacaaccccttcgtcgtgcatttgtggttgtttctcagcgcgccggtaatcgctatcccgttgtttatccactttggcatgtaccgtgcggtcatgcgttattttggcaatgatgcgctgattgcaatcatcaaggccgtgagcctctctgcattattgctggcgctggtggtgtacctgtacagcaatcaccagacggtggtgccgcgctcgatcgtattcaactattggtggttgagcatggtcatcattggcggcctgcgcctggccatgcgtcagtactttcaaggggactggtttactgcggcgcaacacgtgccgttcaccaatcgtgatgatggcttgaccaaggtcgctatctacggtgccggggccgcaggtaatcaattggtggcagccttgcggctggggcgggtaatgcggcctgtggcattcatcgatgatgacagcggcatctccgatcggatcatctcggggttgaaggtgtacaagcccaagcgtatccagcagatgatcaatgagactggcgcggaagagctattactggccatcccttcatccacacgggctcgtcgccgagagatactcggttatctggagggatacccgctgcatgtgcgtagtgttcccggtttcatggatctggctagcgggcgcgtcaaggtcgatgatatccaggaagtcgatattgccgacctgctgggtagggaccctgtacctgcgcagcccgaactgctggagcgatgcatcaagaatcgcgtggtactggtttccggcgcgggcggttcgatcgggtcggagctttgccggcagatccttacgctggaacccaccagcctattgttgttcgaccacagtgagtacaacctctactgcatcctgtccgaacttgaacagcgcgttcaatcagaattgttgaatgtgacgttgttacccatcctcggttcggtgcgccatccggacaaactgctggatgtcatgaatacctggtcggtcgacacggtctaccatgcggcggcctataagcatgtgcccatggtggagcacaacattgccgaaggcattcttaataacgtgatcggtactctcaataccgcgcaggcagcgttgcaggcaggtgtcgagaactttgtgctcatttcaaccgacaaggcggtgcggccaaccaacgtcatgggcagcaccaaacggctggcggagcttgtgttgcaagcgttgagcaaggaattggcaccgacgttgtttggtgatgcgtcgaatatctcgcgcgtcaacaaaacccgtttcaccatggttcgctttggcaacgtactgggctcttcaggttcggttatcccgctgtttcataagcagatccaggcgggaggccctttgacggtgactcatccgaagataacccgctatttcatgacgattcccgaggcggcgcaactggttatccaggcgggttcgatggggcagggcggcgacgttttcgtgctggatatgggtgagcctgtgaagattgtcgagcttgctgaaaagatggttcatctctcgggcttgagtatccgctccgagaaaaacccgcacggagatatcctgattaatttcagtgggctgcgtccgggtgaaaagctgtatgaggagttgttgattggcgacaatgtagcggctactcgtcatccaatgattatgcgagctaatgaagagcttctggggtgggaagtactcaaggccaggttgcacgggttattggcggctgtcgaggagggcgattttgcgctcgtcaggcaactcttgaaagaaaccgtcagtggctatagcccggaaggtgagatcgtcgactggatgcacattcagcgacaccgtgaagtctgatcatctggtggacgctctgatgggcctatttggaggcccatcaggtaaaacttaagttaaagcttccagagttttttgttcagtctgaagctcgataggtagacgaacagtctcgatatgttcatgaacctgttagggcctacagtgtaaagaaccacctttagcaacgagttgatgatctgaagctttccagagtgattttgtgcgtcaccaaatcctgccggtttgtatggcccgcctttttcgaacaaatagttcttcttggcaaattggtagacagggccgctcgcatcgaacggctcatgctcggcaggcagttcatccagtacggcggcgtaggcccttctcagcgtgggcgaaatgtatttcccatcgctcatataatcaaaggcataggctgcgttggaagggaaggctgaaaagttggacagccgttccttgtaatagaagctgacctccaacagatcttcacgtttttcttctcttcccgcaaatgctcgtttgctcaagcgttccggattcttctcgtcaaacgaactgaagtggaagaaaaccagcgggaactctccatttaccgtatagccaccctggccgtcaggggcgagggtgcgctcatggctattccaaaaagccatgttgtagccaagattgaacgatacgtgcagggtcgggaagaagcagggggcgatgctgacccacttctggtcggtggagaggccaaactgagtttcgaaatagcaatgttccagacagcgttcattccaccactggagaaagcgtatgccttctgacgtgtttgaaactgcgtagaagcccagattgaaggagccaaagcgcagcatcccgacatcaccctcgacatgaggcgtgacgtagtggggcgttagaatgatgtcacgcgtaccgagttcgtcccataggccatcgaggcggctgaaaacgcacgtgtcggggtcgaggaagataaccttctcgtgttgctcaagcagctgcaaagtgatccagggcttgagactggtactgaactccacgatgtcgtatttaaaggcgtagtgctggacatttggcaatccgatctcttcaacccaatggaactctgccaggtgggtggggagatccatctcgaccttgcgatcaaaaatatagatcttcagtttaggctgaccgaatttaaccagcgactcggccagcaccaacgctttggacaagtaagccaagttgcacacagtaaaaatggctgagcgctcgacggtcatgcctttttcatcagtcacgtttaaatattcctaatgtattgattactctgacgaggatctgagacgtgcagtagagggtcagtaatcttgtgattctgagcgcgaagctgaactgacagctcgcgagcgcagaaaaaataagtttcaggttcgaagataccgtgtcttttattctggaccatgaatacgcccgcattgaatacgtacggccagcaattcggtagcgactgtcagcctgctcggtcacatgatcaaagccaggtgtggcgccacagacgccgattcgatagcctttattcaatgaatccaggcacagcttataatccacgctgtcgacaaagtagctgcaatccatccagcctagagcgttgagtttatccagaaaataaagactgccactgttgatcagtaggggcacatcgcgtacagacgcgcttccatcggccttgaaagcgatcgcgctgaacgcattgtaagcgtcgaggtggtcggtatagtttttttcgacatgggccagtgtttcttcgttgaaccccgtgtcctgatcaaaaaacagaagtgccgagtggccctgttgataggcgttggcgcataccgttgaaataccgatgcccagccccagatttttaccgcaggtaaaatagtggatctgcggatgatgttcggcgaatgcccgcacgctggcattatcaggtgaattgtcgaatacatagacttcaaacccgtttgccgaagtcaattcaagcctgtgcagtaattcaacgccggcgtgatagacaacaatccctacagcaatcttacgtgtcatgccatacctttgatatgtggagccgcccgtacccggtcgtgtttatacacttaaccatttgctctctttatcgctccatactttcacaaccctggcagggcagcccacggcaatgacgttgcctgggatatctttggcaacaacgctattggcaccgatgatcgagccactgccaatggaggtgttcggcaatatgacgacattgtccccgatccacaccttgtcgccaatggtcacagggccgctgctggacagctttcgttcgaacggtgtttcgtaggggctggactggtcctcccccgagtacgcgccgtgggagtggtccgtgatatggatcttgctgcccatcaacacatcgttgccgatggtgaccttgttacaacaggcgatatgcaagtggtcgctggcagagaaattttcgccgatttcgatacggggttgataggtgaacgcaaggtattgaggaatggcgtgtagccagagtccctcacccaccctgaagttgttacccagtgcgatattttccagtccaaataccttgggcgcacggccgaggtaggcgcgcctgcctggacccggaatcgtcctgaggtgaatgagcgcgcgccacaccaagagaaatctccccgcaagtagcgggataatgaacaggtggtgttgttttaatttctttagaatatatgacaccgcgtttactcgtacttgggtgttaacggatcttggttggctctggactttattgatgtccggatccaggcggctgattgcgtgtaaaccgaagataagtgtcggccatggctttaagcagggggcggggggtaagtgaaataacagcgacaatcaggagtgggtagtcgatggacaagcgtaaggcatgcttgaattgcctgtacgtcgaatagctcaagagcccacgaacgcgcagagataccattccccttaccgaaaaagcccccgacacggcgccgaaactacggcatgcagaaagtttgctcttcagtgcatagctcgatggcagtgagaaaataaagttcacccatttttccaccccaacttcaaatatttttggcgtatgtgcccagcctttcttttgcagggttgggctctctagtgaagtaatagatatgtctcgctcccatcggataactgcattgccacgcgccgcatgttccaatatgaccccggtctgcatgtagtaagaaccgatgtagcggttgaagtccgctgtggcgatcagttctttattataaatcaggcagctcatgcagctcattattccggctagctcggtcaacaaagcatccgggcaactatagtcttggctggctgttgtgtttttatcgatgagattgacgactattgcgctatagctatctgagctttcgattagcttgagtacggacacgatacctttttcggggatttgcgacgtatcccccaagagccacacgtattgggtgtccgcagccttcagtgctttctcgaaattggcctcaggacccagtgtggtcgcgttacgcaggctatgaataaagccgtattctttttgccacttcgcgatcacgtcctgtgtgttatcggtcgaggcattgtctgatatgaaaatttgtaggttgtggctgcgggctagcggaacgtgtaccgacagggatttatctagaaagtccgctcgattgtaggacggaatgacgattgagagagaggggttgccaactggattcatgcgtgcgatctcttgaagtttttaaatatccagtacacccagggcgtcaccaagcaaagcgcgctaaagaaaccgagaaataggtaatcgaagggtagataaatggagataaccagcgtagttgttgctacatacacgccttgtaccacggacgcggtaaccagcggctcttgtttgtgagcccgcatgtagacagccatcgagttgatccataactggatcaaccagccaaatccaaccaatgccaaggcgacatgtgacagcaggcgatttgcgatcggcaggtaatccttgaggagttcgatgcctgtaaacagagttgccaagcccagtatgtaagtcaccgtggcgagcaggagggcgcgtttgaaggtggtgtccagcgctgggtaatcttgctgtgcaacatacatgttcatcttgggtgtgttgattgaaacccagatgtttgcgatgctgaaaagcgccatgcatatcgccatcgatagacccacttgtccagcctctactgttccgtaaaagtggaatgccaaaggggtaaagatagacagaataaaataaccacttatccagctgacagcaaaccgccacatcagtggcatgatttctggcgcccacgcgtgttgggcatgtttaccggcggtataaagctgttgaagcatttttttatagcggcagccgatcaggaccagcccggtcgtcgctccggctagcagggctattgcaagggcgtaaagctcttccccgcagaacagcagaagtgcggtcacggtgactgtgcttacgctgatgtagaaccggattttttgcacatctccgacgctatcgcacccttcgataaacgacagtaacatgctgttcaggaagaccaatacggacgctgcaccatagatgagccagggaaattgccagttgatagctgaacccttgctattcaggaaaacatacccggcccctaataccagggggaaaatcaccatggccattgcacttgaccacttcaaggcaaatttgccaagggttgccaagcggatcatgtgcttggtatcaccggtaagcgttttatcagggttgaacttcaggtgcgcgaattcgtgggatgaaaacagtaaaagtattgacgaaaaacccatgtcagcgaacacagccagggctgccaggctaataaaggtgtaccagtagccttgggcttctgcggagaggtaaagggggactaacagcagtagcagagggccggaaaacaatctccagagctgattgatggcggagtgtcggacatcgtagctcagtaacgttttgagcagcatatttttcacggctgatggcacattctatttttcaacttttgagaaggctggagttttatcaggggcgctctacatacatacgcgctgcatgtaagcgtgcccccaaactgagtggctgcaggttactatttcccggccagctcttttgcgacctctatgatcaggctttcctggccagcaactgccttgcgttcacccagtcggaaaaacacgtcccttgggtctacaccaaattctgcggccgctctggccacgggtttggcgaagccggaaaatactccagcaagaccgctcacgattgagactggggaaatggagggtgcgataaaccccagttccttttctgccatcgtggcagcgtctaggattttgaatagatcaatcccagtgtcatatccgagtttgtgcaacacccctaccagcacttcaagctgtgtattgccggcgccagcgccaaatccacggatggtgccatcgagaattgtcgcgccttcattgaccgctgttacggagttgattacagccattccaaggttattgtggccgtggaagccaactgggatggacaggccatttaccaaagtgctgatgcgagctttgacatcatccaccatctgagcgcccgcagagtccatgatgacaatagcctgggctccataggactccattttcctggcctcttcaagcagcactgctgggctggccatatgcgtcatcatcaggatgccccatgcttccttgcctgactctcggatatagccaatgtggcgctgggtgacatcagcctcggtgcagtgcgcggcaatccggaatacgtcgacacccagttcgactgccttgctcaggtctttcttgatggtgcagaagcccgggataacatggattgccaatcgagtgttgctcagatgctcgcgggagattctgagaatttcctggtcactgagccggctctctccaaccagcatcgacgagccaccgaggccattgccatggccgacctcgataatgggtacattcgctacctccgctgccttgcaataagcgacgaacgcttcggctcccaatttatgccctaccgcatggttaccatcacgcaatgttggatcggtaatgagaatttgcttaggcatgcaggttttccttggcgtgaaaggaggtcgcgatcatttctgcgacagcaatagcggcacagttgatgatgtccaggttgccggcatactgcggcaggtaatcgccgttacccacgacctttatagtcgtcagtactcgatctccttcaaccgttggtgggacgatcagcgcataaccgggaacatactcctgcagctttgcgaccattgcgtctaccgaatgacggatagcaggaatatcagggttggtgatcttggcgtagatggtcgtttgcatgtcgatcggcgggttggccgggttcaggatcagtatcgccttcgtccgctgtgctcccgagaagcgcattagcgcatcctcggtggtctctatgtactcatcaagattggcccgagtggccggccccgcactgagtgatgcaatgctggaaacaacttcgatgtattcaacattggcatgaacggcagcaatcgcactggcgatgggaatggatgactgcccgccgcaggtaatcatattgatgttctgcgtatctccgcctacacattccctagcgttgatggcggggatgcagaacacccccagctttgccggtgtcatgtcgatgactgtctttccgagcttgcgcaatgcatcccagtgctcaacatgtgcatgagcggaggttgcatcaaaaaccaggtcgcatacatcaggcgacgagaggatcgcaccaataccctgatcggatgttggaatgcctagctcggcagctcttttcattcctgccgacgagtagttacgcccggcgaaaagcgtacatacaagatgctgagagcgcattatcttcacgagcaggtcggtaccaatattgcccgaaccgataatagctactttcagtacttttttagtgaccatcacatatatccaaggaagcgcagaatcaaagcaagccgttattttactcgtagctcgttgatctcaagcgcgtgctgtgtttcgtgcaaaaagaagaagttggtttctagcgtctggtcatccatcaggccaaatgcacggagatttccctccgcgtcagcggtgaagcattggtagcccagtccctgaaaaagctcgatgatttggttggggtggtagtcaaattttgctgcccattttcgcagcatttccgtgaatacaataggcttgtcctgggccaacagtttcagcgcaccctggaagacaaaaagctcggccccctcgacgtcacatttgataaagtcgaccttgggcagacccagtcgtgttgacgtgtcgtcaagtaccttgacatcgcaggtaatctttttgacgtcggagcgcccgctcaagttggctgaagaggcatttcccgagcctcctgggtagaaatagaactctagggttttctcttccgaagagaatccaaaattgaaggtcttgatattgtccagctcgttgatgcgcacgttttcttggagcgccagatacgtggaatcaatgggttcaaacgcgtagacattgacgcctgggttctttttggcgatgttgagggcataccatcccatgtttgcgccaatatccaatacgcaggcatttggcttgaccagtttcatgatcatgtttgaatctgtcagctcataatcgccaaagttgagaatctcaaccggcgcaacacgcttgtcaaactcggggcatacaatttttataccattgtcgcgtgaggtcatgaccaccttgccatcggtgatttctatgcgggcaacgtttgtttcttgcaaccatgatgcataggaaaagagcttgctatggaagtcactgtacattccatctatatagtcaggtttgctcaacacttggttttcaaagcactgacgcatctcttccatgttcttcatgtgtaactctcaatggttttcttgaagccctcacggacaggcgtccgggggagccagccgagcttttcgactttagtgatatctgggcagtttctgacaattgggcttactaagtacgtactgtcattttcgcggggagcaagcaaaacgctcaattttttttcggggtatagctctaccagtatttcggccagctctccaatactgatttctcccgcggggttaccaatattgtatgcctcgccgtgggtgccgttgagcaataccgtccagaagcctgctaccgcgtcggctgcatagcagaaggcacgtctcgcagtaccatcgcttttcatggtaatgggctgattattcaggatattggccacaaaatcagcataaacccttccgtcatttaatagcatgtgagggccgtaggtgtgaaagggcctgacgatggtggccggtacgccagcttggtggtgccaactgacgcacatgttttcacccattcgcttgctttccgcgtagcaagcacggaccgaggtcgggtcgacaaacccgaagtctccctccaaggtcggtaccctatcagtctgtccgtacacctcgccgctgctgaagaagagaaaccccttggatttgctcagggctgcaagtttcagcagtgcagcggtccctagtgtgttggcactcaaggtgccaattggatcggtcgaataatacttggggctggcctgactggcggcatgaatgatgtagtcagggcgcacgtcgaattccaaaggattactgacgtcttgttctatgcaaactaagtccgatctgcctaacacatgcgcaaatctgctctcgaagcgctgccggctacgaaccagggcaaagatctggatctccaacccttgtgtttcgttgagaaacaacagcgtttctaccatgtaggcggcgagaaaaccggaggcacccgtaatgagtaccttctgccccctcagacgatgccaaggtaacgggtactgggtcgtaatcgctagcagatcgctcgcgacgatggcattgcgcaagatcttttccatgggagggcttacgcgcccagcgtcttggatttttcatgcatgcccttgagcatggcactctccagttgatcacgtggaatcagtggcgagagatcttccaggggtggagagaccagcgaaccgtcttctttcactatcacggaaagtttcggtgagaacagttgctctgggtgcataaacacctcgcagataatcggtccggtcgcggcctgcactttttccaatgccgggtccacgtcatcccaatgacgaatctggcaagacgggatgccaaagccagttgccagttttgagaagtccgggcacgaaacgcccgaggtccgatcagtccccacgtaagaacctttgaacaaggagttctgagtgtgcttgatcatcaagtagccatcgttgttgaagatgaaaagcttgatcggcaattggtggtgcacgattgtctgcagttcttgcaggttcatcatcatgccgccgtcgcagttgaggcacattacctcacccctgtccgtggcgaacgatacccctagtgctgcaggcaagccgtagcccatctcaccgaggccggtagaggtcatcaggcgctggccatctttcagacgcagtacctggtgcccacacaacagggcggtacccatatcggttacaacgatctggttcggcttgaatacgccgttcaggcgctccatgaaacgataagaatttatgaagccgtctttgtcagcatgctcttcacccacccaagggaattgagcttcataggctttacattgcgccaaccattgcgatttgctaggaattaccagtgtctccagacgagcgctcaatgcctcgataaaggcggcagcgtcactgatgatgacttcgtgtgtgcgtgaagcattcttgatcgcctcttcacgactgatatctaccacgtcgatccttgcttcgcgcgccagctcggtcaggtcataaccgacctgtggtatggccagtcgagtaccaatggcaagtatgtagtcactgttttgcaggataaagttagccgagcgctggccgtagacgccagcgcgtccgaatatcaaagggtgatcggagtcgatcatgtcgatacccgcccaggagacaaggcccggagtaccgagtttctccaggagcggtgcgatacgcttttcggcgccagccaggcggatgccgttgcccagccaaagcagtggccgttcggctttgagcagggcggccacgacgctgtcgacttgggcgcccacttcagcgctgatcgttttatcggtaacgggcgtcgggaaatgcgccatttcgttggctggaatgcggctggactgtatgtccattgggatttcgatccaagttggacccgggcggccttccagcgccacgtatgcggctttttcgagctcgtagacggcctgctccggctgggtgacgcgttgagtgtatttgcagacccggctcaccatctggcaggagtcgtagccctgaacgccccacatgcgcaaagggttatccaccgagcaatgcttggagtgctcattacccgcgatgaccaggcacggaatggagtcggcccaggcagacaccactccagtgacgccattggtggaaccggcgcctgtggtcagcaatgctgcggaaagacgaccattggtgcggtaataggtctgtactgccatgcaagcggcctgttcatggtgcacacagacaatctcggtgtagccacgacggctgatggcctcaaaaagatgaacgttaccggcgccaataatcccgaacgcatgtgtaatgcccaggttttccagtgcttcagcaatctgctcactaactttgattttttccagcgcttgcattttaaaactccgtcgatggacgcttcagcctgctcgaagaccagtagctgagttttgaaaaattatgggtgaggcacccatgtcttttggggcgtttgctggtcaatcaccatcccgaactcgagccgtgggcgacactctcgtgcgtcaggcatgatgacctctatcaacatggggcggggagcttccaaaaactccctcacagggacgtgaaagtcggtatcccgcgtcacgaccctgccagtgatgccataagcctcgccaatggctttgaattgagacgtgtagccgttccagtaggtggatgatgttcgaccctcaaagtacatttcttgaaagccgtgcaccatccctaaggaatgattgttaagcactattatcagtatcggtagttggtctcgcgcgatgatatccagctcttggatgttgagctgggcgccgccgtcaccggtaatgacaatcacaggcttgttaccagcgttgcaaacgccgatggctgttggaatcgcgaaccccatggcgcccagcccgcctgagtgatgcatagattggccatgacttaagcgtagtgtgtgagccacccacatctgattgttgccgacgtcggcaacataatcgacagcttggcctctggcctgctcacaaaggctcgaaaaaatcacgaaaggactgaccagccagtcgctgtactcgtccacaaagctgatctggaagcgggcacgcaattcggcagcccagacaatccaagcttttttattctgcacttgggaaagggggaagtgggcaaagaaggtgttcaattccatcacataggacgcgtgtgtttgaacccggttgttcaattgcccttccatcaggtctatctggataattttggccttgcgggcgaaatcatccggttttgcgccggtttgtcgaacgtccaggcggcttcccaataccagcagaaaatcgcagttttgtacggcgtgattggcagcacgcgtcccgtaggcgccgagcatgcctaggtagttcgcgctcgccgggattttttctgcgcctttcaaactggctacgtaaggaagatccagggcctctaactgcccgagccattgcttgaagtggcgggtattgaccgcccctccacccaaaaggatcaagggcctttcagcggatgccagtgcattgctgatcgcctcaatgtcgtattcactcagctgactcaccgcctgtttgtcactcagtgccaacagtccatttacgacgcggtcatcaatgtcggctcgctgtatatccatcgggatgtccagcaataccggccctgggcgtccttccctggcgatgtcgatggctttttgcaggcagggaagtaactcgtcgacctgtgtgacctgataggcgtacttggtaatgctgccggctagtgccacgctgtcgagctcttgaaaaccctgttggcggatgtgcctctcgcctttgagttcgtaggtattgacctggcctgtgagaaacaggcaggggtggctgtcaagccagcagtcggctatgcctgtcattaggttggtggcgcccgggccgcttgtgcccagggccacgccgagtaattcgtggtgcgttgtacgagcaacgccggatgccgcaaatgctgctccttgctcatggtgaactgataccagcctggtcttgcccagcttattgatgctgtcaaccaggtgcgtgatcatcccgccgatcagttcgtaaccatacagaaccttgttctgtgcaagaaccagcgccacggcatccgatgctttcatcgcctagaaaccaatcccgaagaactcttccagcttctcaccgacaaaatcgaaatgctcctggcccagcgccggctgcacgccgagccagaaggtctggttcatggtgcggtcggtattggtcaattcgccaaccactcggtattccagattctggaagtaaggctggcgggtcaggttgccggcgaacaggaggcgtgtgccgattttgtgctggtcaaggtacttgagcaggtcgacacgcttgacgccgctgctttccttgagtgttaccgggaagccgaaccacgatgggtcgctgttgggtgttgcctcggcgatttcgaggaattcggacaggctggacaagcgctctttgagcagcacgaaattgcgcttgcgcgtgtcgatgaagtcctgggcgcgttcgagttgcgccaggccgcaggcggcctgcatatcggtgattttcaggttgtagcccaggtgcgcatacacgtacttgtggtcatacccttgaggcaggctgccatattgctggccgaaacggtcgccacaggtgttgtcgcagcctggcgcgcagtagcagtcacggccccagtcgcggaacgactcggcaatcactttgagcatcgggttgttggtgaataccgcgccaccttcgcccatggtgatgtggtgcgccgggtagaagctgagggtggcgatatcaccgaacgtgccgaccagcttgccatcgtaggtggcgcccagggcgtcgcagcagtcttccaccaaccacaggttgtacttttcgcacagcgccttgaccttgcccaggttgaacgggttgcccagggtgtgagccagcatgattgccttggttttcggcgtgatggcggcttcgatcaggtcggcattgatgttgtgggtggtcatgtcgacgtcgacgaacaccgggattgcgccaaattgaacgatagggttgaccgtggtcgggaagcccgctgccacgccaatcacttcgtcgccctttttgatcgcccgctcacccagtttgggcgaggtcagggtgctgaaagcaaccaggttggcggaagagccggagttgaccgacagcaggaatttgacaccgaggaattcagccagctttttctcgaattcagcattgaagcggccggtcgtcagccagccgtccagggaggcctcgaccatcagttgcagctctcgtgccccgatcactttgccggacggcgggataacggtctcaccggccacgaacggcttgctcgccaatgcgaccttggcgtattgctcgacgagcttgctgatttcctggcggagcatatcgggtgtcatgaaaattcctgctaaaaaatagagttagttgctgttggcacgcatggcgagcatgtaggcgtcgatttcatccaggcaatgggcctgcatgtcgttgccgctcaaccaggcacgatgccaggtaacaatccgggcgagcgtggttgcaaggttccagctgggtgtccagtgcaggtgcgcgcgcgccttggaaatgtccagcttgaggtagttggcctcatgcggctgcgggtcctggtccaattgccaactggcccctgtgccccaggcctgaaccatgtgatcaaggatccattccaccgggcgtgcgtcttcatccttggggccgaaattccagccctgggcaaagtgatgcccttgggtccagaggtgttcagccaacacaaggtatccactgagtggctccagcacgtgttgccacggccgggtggccttcggattgcgtattgtgacgggctgacccttctcgaaggcacccagaatatcaggtatcagccggtcttctgcccaatcgccgccgccaatcacattgcccgccctgccggatgccaacgctgcgccttgcggatggttgaaaaacgacttgcggtaggcgcttgtgatcagctccacacagcctttgctgttgctgtagggatcatggccgcccatgggttcgtcttcacgatagccccattcccactcacggttctcgtagcatttgtcggtggtgacgttgacgatagcccgcaggttgggacattgccgcgcagcctccagtacgtgcaggctgcccatcacattggtggcgtaggtctcgaccggctcgcggtaagacaaacggaccaatggttgcgccgccatgtgaatcagcacgtcgggattaaagcgcgtcatgctttgggtgatggccgccaggtcgcgaatgtcgccctgctccgactccatgccttcggccaccctggcctcgacgaacagggcagggtgggttggcggcgccagggcaaagcccttcacctgtgcgcccatgctggtcagccagagtgacagccaactacccttgaacccggtgtggccggtcacgaagactcttttgccttgccaaaaggcaggagaaacggtcgacttcatattcagtcccaggatttccagggcgctttgccggactgccaaagctcttccagatagtgtttgtcacgcagtgtgtccatgggctgccagaaccccgggtgttcgtaagccatgagctggccttcggcggcaagcttcatcagcggctcctgttcccaggtggtgctgtcatcctccaggtatttgagcactgcggggctcaagacaaagaaaccaccattgatcagggcaccatcacccttgggtttctccttgaagttcagcacttggcctttctggatatccagcgcgccaaaacggccgggcgggaacgttgcagtgagcgtcgccgctttgccgtgcgacttgtggaaggccagggtcgcgccgatatcaagatcgctgacgccatcaccgtaggtaaagcaaaaggcttcttcgtctttgacgtagtcggcgacgcgacgcaggcgaccaccggtcatggactcgtcgccggtatcgaccagggtgatgttccagtcttcggcgcgttggtcgtgcaccttcatggtgttgtcgcgcatattgaaggtgacatcggacatgtgcaggaaatagttggcgaagtattccttgatcacataccccttgtagccacagcagataatgaagtcattgatgccgtgcgcggagtacatcttcaggatgtgccagagaataggtttgccgccaatctcgaccatgggttttgggcgtacgctggtttcttcgcttagccgcgttcccaggccaccggccaaaataactgctttcatgctgtctccgggtcaattcgagcttacaaaggcgtcagaatggaaatgtttgaggggcaggccagcctgcgtcagcagctcgcgtgcggcgtggatcatggcttctgagccacaggcatagaccgaggtatcggccaggtcaagactttctgcaaggacggcctgttgaacgtagcctgttgcaccgggccattgtgtatccgcacgtgagagcacggggcggtaggtcaggcccagcgatggaaaatcaggctgccagtacaagtcctgctccgtacggccgccccagtacacgtaaatgcgtttgccgctgagtgtttccggtgcgtcactcaagccttcaagcatggctttgaccggggcgattccggttccggttgccatgaacaccaggttcgtcgtgcttgcactgcgcaagcagaaggtgcccagcgggccttccagcctgagcaggtcattggcttgggctccgccaaaccagtactggctcatcacgccatcgggtacttggcggatatgcagttccagcttgccatcctcacgcacggcattggcgatggagtaactacgtcgcacaccgtctttgcctatgacgtcgatgtactgccccggaaggtagaagagtgcgctttttggaggcgttcggaggacaacccttagtacgtcgtccgccaggcgctccagggtatcgaggcggcaaggcatggttttgatctggatgtcggccagcaatcccaggtcttcgatgtccaactcgacatcggtgacggcggcccggcagcacgtcaggatggaaccgcaggcacgctcttcttccgtcagcgcgagttccggttgcaccacctctgtatcgccttgaagcacgttggccttgcacacgccacaacggcccgtacggcaactgtattccagcactgtgccttgggacttggcgcaatccagaaggctcttgccaggttcagccgtaaacgtcttgtggttcgacaatgtaacaatcgacatgcgtcaggcaccatgctcagggttggcgtcgcaaggattcgactcgtccactggagtgcgagggacggccgccatcggcccgatacttttgatacccatgtacgtatacatctcctgtcgtcattgccctgaaagtcatacgacattcagcgcgcagactacgcccctggccggggtcatttttcgtagagtttaaagcggatagaagccgctggcggaaggccccaccagttgaatcgcatatacaactcgcagcaacatcgcagcgtgttgctgattattgaataacggactgcctattgatggcggcaattctacctgcttgggaccgtaactggaaatgcaggatatccggggcctgcccaggccgtttcactggcattgagtgggcgggtcatacgctgttaccgatccgtttttgactccttccaaacatcacctaagtttgaaatgcagcttaggaaagctgcatttcctttatcgatgtcatggagtgtcaccaatgcaaaacgcctatatcgcctccttaatcttcgccttcctcaccaccctctctgtcaccaccaccgcagcgccctccgtcaaaaccgaggctccaatcccgatcacgacccaaatgtccaaggcagagcaatccgccaaggtcaatctgaacgccgccgatgccgaaaccctgcgtcgtgacctctttggcatcggcgccgccaaggccaaggcgatcatcgcctaccgcgagagcaatggtccgttcactgctgttgatgaactactggaggtgaagggcataggcaaggcgctgctggagaagaaccgcgaaaggattgtaatcaactgagcacaggacggccggtcaccgaccggccattccatcatccgaaacctgtgccttcaggctttcccttactacgtccagaatacgcaccgccagcgctgcgctttcgacacttctggccagcgccaatgcgcccactagcgtcgacatcattaccaggctttcttcatcggcattcgtgctaatcagcgtcgcttccacctgctgcaagcgcgccctcagtaccgcgtccgtggtcggactctgctggcccctcaaccccaactccgagcacatggtaggcaatgggcaaccctgatccggcgaggctcgatgccattcagataagtaactatcaataaatgcctcaagagggcgttcctggctgaacaacatttcgcaatgcgcatccagctcggcagctgcggcttgcagcgccttttctaccagttcgtccttggatttgaagtgggcatagaacccgccatgcgtcaggtccagagccttcatcaagggctgcagaccggtcgcgccgatcccgtcgcgacgaaagcgtacagaggcttccttgatgatgcgttggtgggtcttggctttgtggtcggatgagtaacgcataggtgggcctcagtgacaggctggcattttaaccaacttgaatctttttacacgctgacacgttggcatgaaaagtggttacctacccatcgaagattgttcaacaatcatgaaggtagccatgacactcagtttgtctctcgccgaccagattgccctggagcttcgcgctgacatcatcggcgggcgactgctgccaggaatgcctttggtcgaagtagaactggtcaaagcctacaacgcatcgcgcaacacgatccgtgaagcgttgcaccgcctcgggcaagaagggttgacccgttatgtgcgcaacaagggggtgatggtccggcggttggcgcgagaggaggtgcgtgatttgtttgtcgtgcgccgcaccctagagttgcaggccatcgctcagagcggtcccctgacggaggatcaatccgaacgcatgcaaaacgccatcgacgccaccaccctggcccgcgagcgcgaagactggcgtgctgtcgccacccatagcttggtgtttcaccagcacatcgtcgggttgatgcgcagcccgttgttcgatgagttttttgcccaggtcatcgctcaactgcgcttggtgttttgcgctgcgcctgatgagcagcgttttcagtcgccgtggctggagcgtgatcgtgatatctacacattattggtcgagcaggataaatcggcggcgggggaggcgatgagcctgtacctggatgattcggaacgcctgtccctggccttgtttaaccacccctgatcgaggatctgcaccatgtacaaagactatccggccgcttatcaggtcagtaaaggttcggcgttgcaggtcgacacagcgttttacgagcgcatccgtgatcgaaaagaccagcgcacgctgatcgagcagtttgaggtgccgattcgtacgggcagggcgtggaaggtgccagccgggcatgtgttccgtgtgaccacgccggttggcccgcaggtgggtgatttcaacgtatggaatgccaatgacccccgtgagcgcctgtgggcggcgcgtacccgccaattgcagggcgcccatgtcagcacccatgaccgcttgtggtcgaatttgccattcctgcggcctttggtgacgatcacggatgacagcctggccagctacgggatcgatgagcacggcgggcggctgcatgatttgcttggcacacgttgtgatccctatgttaatcggatgctcaccggtgaggacttccatcaccattgccactccaacctgacacgtgcggttttgccccacggactgacggaattcgacgtgcatgacgtgctgaatattttccagtgcactggtctcaatcacgacgacatgtacttcatgaaggcctgccctgcacagaagggcgactacctggagttctttgccgagattgatttgctgtgcgcgctgtctacgtgccccggtggggatttgtcgctgccgatgtgggggccggaggcgcaggacccgctgacggtgtgccgtccgctgggggttgagatctacacgttggaggatgagttgctcaatggctggcgccagccggaacgtgctgcctacaaggggcagcacgggttgcatattgccaaggcggattgggagtaacccaaggctcagcgatcctgcgcatccttggcatccgcctgggcgttgcgctcggccacacgcttgcgttgttcgtcggtgagttcaactttgttggcgctgtcacgcagcatcatcagcccaccgacgatcgacccgatcgcaactaccataatcaaccacgcataccacggcataaggctctccttgaggcagattgccgtgggagagttttcccacggtaataactgctttgagtgacgggctttcttactagttcagtgtaggcccgttctgcctcgtagtagatcagagcccggtcaacatcgcatccgccggtgcatcggcacggtcttgcgcagtcatctggaagtaggcgaaccccaccaccataaagcccaggaagatcagcccgatcagcgtgttgaaccaagccatggccaccaggcacaccaccgccagcaccagtgctatgcccggcacgatggggtaacccggtgcacggaaggtgcgctccagcagcggttcggtcttgcgcagtttgaacaggctgagcatgctcatgatgtacatcacgatggcgccgaataccgccatggtgatcatcgccgcggtcagtgtcatgccacccaggttgatcaggccgtcgctgtagatcgccgcgatgccgatcacgccgccggcgatgattgcacggtggggggtctgaaaacgtgacagtttggcgaggaaagacggcaggtaaccggcgcgggccagggcgaagaactggcgcgagtagcccaggatgatgccgtggaaactggccaccaggccgaacaggccgatccacaccagcatgtgcaaccagccggagctgtcgccgaccacggttttcatggcttgtggcagtgggtcgttgatgttcgacagggtgcgccagtcacccacgccgccggcgaagaacatcacgcccatggccaggatcaccagggtcaggatgccgctgatgtaggcctttggaatggtgcgcttggggtctttggcttcttcggcggccatcgcggcgccttcgatggcgaggaagaaccagatggcgaagggaatcgcggcaaacatgccggcaatcgccggtgcgccaaaagtatcggaaccggcccagccattcagggcaaagttactgaagctgaaggcgggtgccactacgcccatgaacaccagcaattcagcgacggcgagcacgcacaccaccagttcgaaggtggcggcgagcttaacgccgaggatgttcaggcccatgaacacgatgtaggcaccgacggccgcgtgtttggggtccagcgccgggaactgcacattcagataggcgccgatggccaaggcgatggcaggcggcgcaaagacgaattcgatcaaggtcgcgagccccgcgatcaagccgcctttctctccaaaggcacgacggctgtaggcaaacggcccacccgcatgaggaatggcggtggtcagttcggtgaagctgaagatgaaacaggtgtacatcgcggcaaccatcaatgaggtcaccaggaagcccagggtcccggcgacgccccagccatagctccagccgaagtactccccggatatcaccagcccgaccgcgatgccccataagtgcagggtgcccaaggtgggtttgagttgtgtgttcatcgtgatgcgctccctgaacggtttggaatgattcaaggtgttgcagcggacatgccatgcctcacaaccgtgtcgtaaagcggcgcaactgtcgtctgggagatggtttggcgtttgaaattttccggtgtcgcaccagataagtgcgcgggtggctggcagggcctcatcgggggcaagccccctcccacacttggcctgcgtagaccggtcaacatgtgggagggggcttgcccccgatggggccctccaatccagcacaaccctccctgtaaaccccgcataaacccactctttacgccgtctttacgccccgcccacaccctcgctctcgttcctttacgccactcctgccgacaattgccccacacgcggcactcgccgctaaacggagagacttccatgagcgttctggacggggtgtcactgctattggccgtggcgctgttcatttatctgctggttgcgctgttacgcgcggatcggaactaggagctggccatgcacagttatgactattggctgatcattgccttctttgccgtggtgctggtgccggccccgttcctggggcggttctattacaaagtgatggaggggcagcgcacctggctcacaccggtgttcggccctgtggaacgcgcctgttatcgcctgtcgggcgtggatgagcatcaggaacagagctggcagaagtacatgctggcgttgctcgctttcaaccttgcgggctttttgctgttgttcgcgatcttgttgttccaggactacctcccactgaacccgcagaaattgccggggcaggaatggacgctggcgttcaacactgcagtcagtttcatgaccaacaccaactggcagtcctacagcggtgaagcgtcactgagctacctcagccagatggccggcctgaccgtgcagaacttcgtcagcgcggcgaccggtctggccgtccttgtcgctttgtgtcgtgggatcggtcgcaaatccaccaagacattgggcaacttctgggtcgacatgacccgcgccaccctctacggcttgctgccgttgtgcctggtgctggcgttgttcctggtgtggcagggcgtcccccagaccttcgcccattacgtggatgccgtgaccctgcagggtgtggatcaagtgatccccctgggcccggcggccagccagattgcgatcaagcaattgggcaccaacggcggtggcttcttcggtgtcaactcggcgcatccgtttgaagaccctaccgcttgggcaaacttgttcgaagtggcgtcaattatcctgatccccgtggcgctggtgttcaccttcggccactacgtgaaggacctgcgtcagagccgcgcaatcctcggctgcatgctggcgttgttcatcatcggcggcgcgacctcgctgtgggccgaataccagcccaacccgaccctgaacaacccggccgtggagcagactgcgccactggaaggcaaggaggcacgcttcggtaccaccggcacggtgctgtggtcggtgaccacgacagcggcgtccaacggctcggtcaacggcatgcaggacagcctgagccctctcagtggcatggtcgcgctggtcaacatgatggtcggcgaagtgatcttcggcggcgtcggcgctggcatgtacggcatgttactcaacgtgttgattgcagtgttcctcgccggcctgatgattggccgcaccccggaatacctgggcaagaagctgcaggccaaagaagtgcaattgctggtggtgaccttgctggtgatgccggtgggcgttctggtgctcggcgccattgccgccagcctgcctggcccggccggcgcgatcagcaaccctggcccccacggtttcagccagttgctctacgcctacacctcggccagtgccaacaacggctcggcgttcggtggcttcagcgccaacaccccgttccacaacctgatgctgggcctgggcatgttgatcggccgcttcggctacatcctcccggtactggccctggccggtagcctggcgatgaagaagaccgcaccgattggccagaacagcttcccgacccatggcccgctgttcgtgaccctgttgaccgtgaccattctgctggtgggcggcctgaccttcctgccgacgctggcactgggccctatcgctgaacatctgagcatgggcttctaaggggatatgaaaatgaatatgcctgcaaaaaacgcagctcctgccaaaacccaggagcctgccaaaaccgccatctccgccctgtggcgcccggcgctggtccaggcgttcgtcaagctggacccgcgccagctgcaacgctcgccggtgatgctggtggtcgagttgaccgccatcctcaccaccgtgttgtgctttgtgcccgacaccgccgtgccgacctatgtcgccgtgcagatcgccgtgtggctgtggttcaccgtgctgttcgccaacttcgccgaagccttggccgaaggacgtggcaaggcccgcgctgacagcctcaaggccggcagcgaaggcctcagcgcacggcgcaaggaggccgatggcagcttcaaggtcgtgccggccaccagcctgcgcaaaggtgatgtggtgcgtgtcgccgccggggaaatgatccccggtgacggcgaagtcatcgaaggcatcgcggcggtcaacgaagcggccattaccggtgagtcggcaccggtgatccgcgagtccggcggcgaccgttcggcggtcaccggcaacacacgcctggtgtcggactggctgctgatccgcatcaccgccaacccgggcgagtcgaccctggaccgcatgatcgccctggtggaaggggccaagcgccagaaaacccccaacgaagtggcgctggacattctgctgatcggcctgaccctgatcttcctgttggtggtggtaaccctgcagccgttcgcccatttcgccagcggcagcttgccgttggtgttcctggtcgcactgctggtgacgctgattcctacaactattggcggattgctgtcggccatcggcatcgccggtatggaccgtctggtgcgcctcaacgtgatcgccaagtccgggcgtgccgtggaagctgcgggcgacgtgcatgtgttgctgctggacaagaccggcaccatcactttcggtaaccgtcgctgtgcggcagtggtcgcggcgcctggcgtcagcggcaaggaagtggccgagggcgcgttgtttgcctccctggcggatgacacggcggaaggtaaatccatcgtcgaatacctgcgcgccttgcaccctcaagccgagccgagcgcagacgaactgacggccgtgccgttcagtgctgaaacccgcttgtccggtgtcgactaccagggccgtgtgttccgcaaaggcgcggtggattcgctgctggccttcatcggtcaacaacgtcgcgacttgcagcctgcgctgtcgcgggaaatcgacaagatcgcccagagcggcggcaccccgttgctggtgtgtgccgacggcaagttgctcggcgcgatccacctgaaggacgtggtcaagccgggcattcgcgagcgtttcgccgagctgcgcaaactggggatccgtaccgtgatggtcaccggcgacaacccgttgaccgccgccgcgattgccgccgaagccggcgtggatgacgtactggccgaagccacccccgagaaaaaactcgcccgcatccgtcatgagcaaaatgacggccgcctggtggcgatgtgcggcgacggtgccaacgacgctccggcgctggcccaggcggatgtcggcatggcgatgaacgatggtacccaggctgcgcgcgaggccgccaacatggtcgacctcgacagcgacccgaccaagctgctcgacgtggtgcagatcggcaaggaattgctggtgacccgtggcgcattgaccaccttttccatcgccaacgacgtggccaagtacttcgcgatcctgccggcgctgttcgcctcgatctacccgcaactgggcgtgctcaacgtgatgcacttgcagagcccgcagagcgcgatcctttcggccatcgtgttcaacgcgctgatcatcgtggtgctgattcccctggcgctgcgcggtgtgcgcgtccaggcggcgagtgcggcggcattgctgcggcgcaacctgctgatctacgggctgggcgggattctggtgccgttcgtgggcatcaaggcgatcgacatgctgctgactgcgttgcacctggtttgacccgattcctgtgggcgcccggcgggtgcccacaggttgcaatgaccgaattgaggaatccgaaatgtccaacatgatccgcccggccctgagcctgctggtgctcatgaccctgattaccggcgtcgcttacccactggtggtgaccggtgtcgcccaagtggctttcccggaccaggccaatggcagcctggtacgcgatgacagcggcaaggtgcgtggctccagcctgatcgcccaggattttaccggtgacaactggtttcacccgcgcccctcggctggcgcttttgcgacggtctccagcagtgccagtaaccttggtccaagcaacccggcgctggcgacgcgtatcttcgatgacgcgagtaaacagctggtgccgagccaggggccggtgcctctggtatcgctgactacctctggcagcggtcttgatccacacttgccaccacaggcgattgcctatcaactggcgcgggtggcggcggcgcggaatgtgccggtgtcgaccttgcagcgcttgctcgatgaacacatcgaaagcccgctggtgggcccgccggtggtgaatgtgctggcgctgaacatggccctggaaaagttgtaggccgtggcgcagccatcgcaggcaagccagctcccacaggggaatgcattccaaatgtgggagtgggcttgcccgcgatggcggcctgaggcgcaaccaataaacatctgaaggaaccccgagcatgagcgactccggccgcgccgatgccctgttagccgatctgccccgggacggccgtggccggctcaaagttttcctcggcgctgcgccgggcgtgggcaagacctacgccatgctccaggccgcgcacacgcagttgcgccaaggcgtgcgcctggttgccggcgtggtcgaaacccacggccgcgccgagaccgaagccttgctcagcggcctgccgcagcaaccattgctgcgcagtgaataccgtggcgtgatgctcgaagaaatggacctggacggcctgctcgccgccaagcccaagctggtgctggtggacgaactggcccacagcaacgcccccggtagccgtcacgaaaagcgctggcaagacatccaggaactgctcgccgccggcatcaacgtgtttaccacggtcaacgtccagcatctggaaagcctcaacgaccaggtgcgcggcatcaccggcgtgcaggtgcgtgaaaccctgccggactgggtgctgcaagaggccgacgaactgctgctgatcgacctgccgtcccgcgagctgttggagcgcctgcgcgacggtaaggtctatgtgccggagcaggcgcgtgcggccatcgatgcgttcttcacccagaccaacctcatggccctgcgcgagttggcgatgcagaccgccgccgcccacgtcgatgacgatttggcccaaggctatcgccagctcggccaggctgcgccggcggtgcgtgggcgtttgctggtcggcgtggatggtgatgcgcaggccgagcgcctggtgcgtcatgccagtcgcgtcgcccagcgccgccatttgccgtggagcctggtgcatatcgataacggtcgtgcgcgggacgaacagtcgcggctgcgcctgcaaaatgcccagcagttggccgagcgcctgggcggcgaggtggtattgctgcgcgcaggggaggtggccaagacactgatccagcacgccgccgaacgccgcgccagcctgctgctggtggggcagtcgcgcatgcgttggcgccgtcgcttgttcggcggcggcctggctgcgcgtttgctgcgtaatgcgcggggcttggaaatcaacgtcctcgacagtgacgacatgcctgcgccgccacgcttgccggatgtacgtgggctggtgtggttcgactatgcgctggcagttgtggcaacggtggcggcggcggcggtggcctgggccgtgtccagcgccttgccgttgccgaacatttcgttggtgttcctcgctgcggtgttgctggtggcggtgcgcagcagcctggggccgtcgctgatgtgtgcggcgctgtcgttcctgacctacgacttcctgtttatcccgccgaatttttccttcgccatccaacgtgaagaagacgtactgaccctgttgttcttcctgttgatggcggcgttgaccggcaacctggctgcgcgccagcgccgtcagttgcaggcgttgcgcgacacccaggaagaaaccagcgagctgctcgacctgtcgcgcaaactcaccgccgccactgatcgccaggcggtaatcagtgctgccgcgcatcacctggagggctggagcgacctggacctgtgccttgtcaatcgcgatggccagggcggttgggccatcgagacgggcggcccgctgaccctgactgaagctgagcgtgccgccgccgattgggcctggcaacatgaccaaccagcgggcatgggcaccggaaccctgccgttcgggcgttggtggtggtggccgttgtcgggcgaagaaggcccgttgggtttgctcggggtcagccccaaacccggcctggaattgagcgggcaacgccgtcgtctgctcactgccttgagccaaccgctggcccaggcgctggcgcgggcgcaactggcccaggagttggagtctgcacggttgcacggcgaaaccgagcaattgcgcagcgccttgctggcgtcggtatcccatgatttgcgcacgccgctgacctccatgcgtggcagcatcgacagcctgctggcgctcggtgaggccatcccgctggaggaccgccgcgagttgctcgaaggcacccgcgatgaggctgaacgtctcgaccgttacatccagaacctgctggacatgacccgcctcggtcacggcgctttgaagctggcgcgcgattgggtgtcgccgggtgatatcgtcggcagcgccctcggccgtctgcgtgcgatgctggcgccgttgcaggtgagtaccgaagtgccgcccgagttgccgttgttatatgtgcacgccgcgctgatcgagcaggcgctggtcaatgtgttggaaaacgccgcacgtttttcgccgccgcaagggcgcttgcaactgagcgccggcgttgccgataaccagttgttcttcgccgtggctgacgaaggccccggtattcccgaggatgagcgcgcaaagatcttcgatatgttctacaccgcagcacgcggtgatcgaggcgggcagggcacggggctgggcctcgcaatttgccagggcatggtcggcgctcacggtgggcatatcagcgtggccgacggcattgacgggcgtggcacctgcatcaccttgttcctgcctttaccgacacagcctggcctggagcgcgaggcatgagctaccctgttttcttcacggattttgattggaagccatgagccagaccgcgacgattttggtcattgatgacgaaccgcagatccgcaaattcctgcgtatcagcctggcctcccagggctacaaagtgattgaggccggcactggcaacgaaggcctggcccaggcagcgttgaacaaaccggacttgttggtcctcgaccttggcctgccggacatggacggccagcaggtgctacgtgaatttcgcgagtggtcgacggtgccggtgctggtgctgtcggtgcgggccagcgaggggcaaaaggtcgaggccctggatggtggtgcgaatgactatgtgaccaaacccttcggtatccaggaattcctggcccgggtgcgggcgctgctgcgtcaggcgccagcgggtgaggcccaggaagcagccttgcgttttggcccgctgacggtggacctggcctatcgccgggtgctgctggacggcgccgaagtggcgctgacgcgtaaggaatacgcagtgctggcgcaactggcgcggcatccggggcgagtgattacccagcaacagttgctcaaggatatctgggggccgacccataccgaggacagccactacctgcgcatcgtcgtggggcacctgcgtcagaagctggcggatgacccgacccagccacggtttatcgtgaccgaggcgggagtggggtatcggttattgggcggatagatagacctcaggcgcgctctgtggcgagcgggcttgttgtggcgagcccgctcgccacaacggctttagtgacacgtctgtttcagcgttgctcactttcataacggtccagcgtatcactggcaatttcccgccccagggcgatcaactccggcgctttgtagaactcgaaaaaccggcacacccgcttcggcacgttgatcagcacgtctggcgggtagcccgcgatcttgtactgcgccagcgacgtctgcatcacctcgaagctctggttgatcaggtccagcagcgaagccgggccgacgttatcgatgatgaacgacccggttgccgacttcggtgcgccgggcttttccggtgccgcggcgggttgttgggattccggctcggcagattccagccacgggttgatctccgccgcctgcgcttccaacgcctcctgctccagtttcatcagttgttcggcctgcttgcggcgaaagggcaggtgcgaaccgagtgatctcgccaggttgttgaagcggctcttgaacgcgggtgggcgttggatcaccggcaactggtagtgcttctgattggtggcgttgaggttgaccgcgatgatcaagtcacagtggctcgacaccaccggtacgatgggcagcgggttgagcaggccgccgtccaccagcatgcggttgccttgcatcactggggtgaacaggctggggatcgccgccgaggcgcgcatggcttggtgcaggcagccttcctggaaccagatttcctgctggttggtgaggtcggtggcgacggcggtgtaggggatgcgcagttcttcgatgttgatctcgccgacgatcttgcggatctgcccgaagactttctcgccgcgaatggcgcccaggcggaagctcacgtcgaccaggcgcaacacgtcgaggtagtcgaggctttcaatccagtttcgatactcgtccagcttgccggcggcgtaaatgccgcccactacggcccccattgaacagccggcgatacaggcgatatcgtagccgcgccgttcgatttcctcgatcaccccgatatgagcgtacccccgggcgccaccggagcccagcaccaacgcaacacgtttcttcatggtccatgtcctccccaaggcaggtccccacaatgcacccatgagaggccggcttcaatattcgtgggagcctgcaatatttttccagaatagcggtgttgctcgggtatgctctggtcaataggcactaccgatttcaggctaaggacaggcacttttccctgtaggcaacgtctacaacgtacgactgttttttcttttttgaggtgtcatcgatgaaagcctggatgtgtgtgcctgtgatcgtgttggccctggccggttgcgccgggaaaaccgcataccgcgacagctgcggcagccagttggacgccgcctggaaagaactggacctggctaaggctgaaggctttgccggtaccgtgagctactctaaggcactgtctttgttgacgggcgccaagacccagcaacagtttgaagcgtttgaaggctgctccaacaaggccgagaaagcgcgtttctatattcgtgagtctcgcgccgggcgttgacctgcagcgagtaggatttttcatcaggtagtgagggcaggatgtcagctttggtcgatcagttagtcgctcaggtcattggcctggaagtagggttactgagctgccaggctcgccttgccgccgtcaccgatgatgaagccctacatgacctgcgcaccaccgtgcgccgtctgcgcagcctgttgcggcccttgcgcgggttgccaggggtggagcagcttgaagtggcggccagcacggtcggccaattgaccacgccgctacgcgaccgcgaggtgctggcggcgtatttgcaccagcatggccatcatgaggccgcaaaccgacgactgtgcctgcaacccgaagcctatcgtcaggtggcgcaaagcccggaacttgcgcacttgctgctgatcctcgacgccttcccgcgtttcctccgtgcttctgaacaccagaaattgctcaaaggcctgcgaccacgcatcgaaaagcgtctggccaagcaatggcagacactcgataaggccttgaaggaaccgggccatgatcgccaccgcctgcgcttgctgatcaaacgcgtgcgctacgctgcagaagcctatcccgaattggacaagttgcccgccaaggccatgtcgcacctgaaaaaagcccagggcgcccttggggattggcatgattgctggcagtggttggcccaggctgaacaccaggcagatctgcaaccttgtgttgccgtatggcatcgcaccatggccaaggcgcaggggcaggcggaccgcgtgctggataaactcagtgctgattgtttctgaaccggtccggtttttggccggaataggcgctgtacctgattggtccgatggttaagatccctcatctgttccttttgatgtgagaccgccatgcgctttagtgatttgctcgacgccgcccgcagcaacccgctggatgtgaccatccccgctgagtgggcccagggccgtgcgacctttggcggcctggtcgccgcattgcaatacgaagccctgcgtgcccaagtgcccgcggatcgtcctttacggtcgttggcaatcacctttgttggcccggtagcgccggacgtccccgccagttatcaagtcgaagtgttgcgtgaaggcaaagctgtcagccaattgcttggccgcgtggtgcagaacggtgaagtgacgacactggtacaggccagtttcggtggggcccgtgagtcggaaattgcggtcgaaagcaaagcgcctccggtgttcaaacattgggatgagtgccaggaactgccctatatcaagggcgtcactccggagttcatgcgccatctggcgatgcgttggagtgtcggcggcttaccctttaccggtaacaaatcccgcgacatgggcggttgggtacggttgcgcggcgatgtgaaagaagaaccgctgaccgaagcgcatatccttgccctagtcgacgcctggcccccggcgttgctgccgcacctgaaaaagccggcgccgggcagcaccctgacctggaccatcgaattcatccagccattacaagacctcacgaccctcgactggtgccagtattacgtcaatatcgagcacgcccgcgacggctacggccatgccgccgccgccctgtggagcccgaccggcgcactcatcgccatcagccgccagaccgtggtggtcttcgcctgacctcaatgctggtggcgctgccgccaggcacgccaccagccaccgctcaacacaaaacgtggaaaggtcacgaactgctcgaccatcaggcgctggaccgaatctttacgatcactgaacggctcactggcctcggcctccaggctatgcccatgacgctgcaacgccaggccggccaagataccgaccacaccgacggcaaagctggccagactcaggctgaacaccccggacacaatcaacagaaacccgatgatgaacagcggcacggcaatcaggtgcaacgccaggttggtcgggtgctgatggttctgcgggtagtgacgccattgccaggcggggagattggggtgacgtttgcccatgatggtgaatcctctgtccgttgaaacaacttgaacagagtttaggtggggggggggcggggcggcgaattggggttggctatggggctcatagagggtagttttgggcatgtccccgtgatgcccaaataacgcattaatggtggtccatgtgcatcaagaacgtgaggttgttatcggctatccagactagatatccggacctctcacccagaaccgttgcaatatcttgtgcatcatggattttccaagccttgtatgcgaaatcgaacaccactaaaaccagattttctcggctaatacgattctgtatgttctgaaaaaattagggttgtgctctgtgcttttttcatccgattcgactgggtcgagtacattactttctgtcttgaaatactgctttgccagatagttaatcgaagtggtaagtttagtcgatttaattttttggcgcgtatatttaaagtttcgaatgaaaggtctatctttttttcgagataatacatcagatagcgccgcctaggggtattcttggggggttgtatattggttttgagttatttgaaataatagtcgtctggatcgttgatgtaaacagttggtccgctaagtgaaatgaattttgcgttgaactctatggatgcattgtcgctggtagcttcaaaagtaaagtagtccatttttttattgattgttacggtaaataactcatgtgctgggatgttaaagactttcaggttttcaatgtcgttgcaggttatcccaagtctgcacatgttataccctttgtttttccatttttctggcagtttgtctggaaattcggggatgtcgaatcctatcccaacacaaggttgatcattttctacccttaatgagaaaagggctatttttccaatttcaacaggaaggctgaaaattttactgaggagtatactgccctctaactcgttccagtatttcattttttatttcctgaatggatagtgtttttttgcgccttcaatataaccttttcggggtttttcgattggtcgcaaattaaagtgcgctgaatggtctccaataccgtctacgcttccgtatttatggcctgctgagtggtcttggataaggattttcgagccgtttgctcttgtgaattgatagacttttgtgtttatgggtttgccgttttcatccaaaattgttttcctattcttgtctgtcattttttcagccgtgtattgttttgcctttcctgtgtctgggtctattaccatgtctggagtctgaaccatcggtatcccagcatctcttttcgcttgtctgaaggcgcctcggcgagaaacatcaggtgtttccggttcattctgtgttttacaggctggctgttgtatccctttcggcggacaattggcgctcagccctgtcgcatccacccagccagtagggttgggcacgtacaggtacgtgttaattccacccgccaacttcaccggatccggcgtcaggtaccgacccacatccggattgtagtagcgatgacggttgtagtgcagcccgctttcctgatcgaaatactgaccctggaaacgcagcgggttgtcgacttttctgatgtcgaggcgggtgatttccccgtaggcgcggtaatgcgcggaccagacgatttcgccatccggggcggtgagttcctgtggggtgccgaggtggtcgagttggtagtggtaggccttggtttccttggggccgaagccttccagcagcgccagcggacggaagctgtccggttcatagagatagctgcggtgccgatccgcgtggtgttcggcgatgagtttgtcgccttgccagaagaactcagtggttacaccgtcgacggttttactgatacgccgcccaaacgggtcgtagcggtagctggcggtctggccgttgggttttttaataccgatcagacggtgctggcagtcgtagcggtattcggtgacgagtacgtggcctttgccgcggcgttcgcgaatcaggttgccgaaggcgtcgtagtcatagtggtggtcgccctgaatcatcaggcggttgccggcgacgatgtccgggccggggcggttgtgcatcagcaggttgccggccgggtcgtggccgaagcgctcctgttcgtcttgggagtggtcggcgcgggtgaggcggttgagtgggtcgtagtggtagcggtgttcgcctttgcgggtgtcgagcaggcgggtgaggttgccggatttgtcgtagtcgtagtggcgtctgtacaccgggccttcggcgtcattgatgctctggttgaacaggcgtccctggtggtcgtgttgatagcggctgagcagttggccttgttggcgttgctgttcgcggccggccttgaacaggtgtgaggtgagtaccgcgccgttcagttcgacggtggcgaggtggccgcctttgtcgtgagtgaaggtgaggcggttgttgtccggcaggcgcaggttttgcaattggccgcaggcgtcgtagccgtagcgcagggtgccccagccttggtgttcggtggtgaggcggttttggctgtcgtactcgtaggccagggaccagtggccgtcttcgacgcttaggagattgccctggcggtcgtaggcgtaatcgacggtattgccatcgggcagggtttttctgacgaggcgtccggcgtaatcgcgctggtagcgggtaaccaactgactgccgtcatcgccgtgttcggtcttttccgaaaggttgccattaaggtcgtaaacgtaagcggtgcgctggccgtcaaacccggtttcctgctggatcaggccgttgttgtggtactggagccggtaggtctcgccaacttcgttttcgatttcggtcagcagtaaccgcgcgttgtcgtagcggtagttgacctggctgccatcggcattgatacggcggctgatcaggtgcaggccgtcggcgtattcgtagcgggtgacgtgcccgagttcatcgcgctcggcggtgatttttccgtaggggttgtagttgtattccctgaacccgtcgcctggcagcacaacacgaatcaaccgacccacgccgtcccactgatactgggtcagcgcgccatgttcatcctcacgcgcaatctgtcgtcccagatcgtcatagcgataacgcttgatcccaccattgggcaactgctcctcaagcaactgcccacgctcattccataccagccgctgacagctgtgatccggataccaaaccccaaccaactgtccgtatttgttgtaggtgtaatcggtaacgtgaccgtcaggatcgatcttgcgaatgacatcgccctggtcattgcgctcatacttccaaaccgctttaccacgccgcacaacccgtacgaacccgttgtcatgctcgtaggtcgtcggctcatcgtcccccggaaacaccgccaccaagcgcccggcttcgtcgtactgatacgcggtgatcgcccccagcggatcctgctcaacggtcagccggccttggtcatcgtaggatttgaaatgctcggccccgtcaggatcaacccgctgcaccagccgcgcccgctggtcatgtacgtagacttcctggctgccatcggcgttaaacaccgtgacctggccgttgtcatcccaggcatagcgcgtgtccatctgcgagaaactcgcccaatgccgcacacaccgcgccgtcttgccagaccgttcccattcccagaaaaagctcgccccaccggccaagccacgctcaagaatgacgtgctgttcgtcgtaccgataaacttcgctttcgccgacggcattggtcgctgaaaccagtcgtccaagctcgtcataggcgtaggaaacaaccgtctgctccgtcacccaaacaaacggcccctcatccacaacgcgatgaatctggtaatccaccgccacgatgcggcccgacgcataacgcaaaaacagcgagcgcccgacaccgttatccacccgctcaacacgccccagaaaatcccgggaaatacgcaggcggttgtcatacgcatcgctgatcgttgtcagcacaccgtcgcggaagtggtagaaacgtgatgcctgcgccagcaccagttcatcaggcaacgaccctaggtagatcgccgcttcggccaagctattggtgatcgcaggccgagaaaccgtgggcaagggcagggtggtcgaccgattctcatgatcggtccaaaccaccgaatccccggaaacactcaaccgatgcgccagcgagtgactccagccaaaccccaacccaccatccacttccaccgcactggtgcggtacaagcgagtccactcaaacggcaagatcccgtccagcgtcccatcggtgagggtcagcaactcctcgccggtgaccatcgacaccgggcagccgttggtggcggtcttgtcggaaggcgctgatgcatccccagccggattcttcgcaacagctggcacgtcatccacatgctcttgctgaaccaacacagttcgccgggacttgctgcgcaccgcaggcaccgcgttggcaaccacctgatccccagccttcaacggtgcatccggaactaccctgatcggcgtcgcggagctacccagcaacaccggcctggccgcctcgacatgcgcgtccaaccgaggcccgaccagttgatccgccagcatttgcagccatctacgcacgcgtccggacttgatgtgccccagcacctgcatacccaaacgaagctgaacccccatgccccgcgtggcccagatcagaaacagattgatcagtacctcgccggttatctcgcccagcagctcgtacatctgcggcggtggcagcatgcgtatccaggcaaccatggccgacaggtagataaacaacagcggctcatcgctgagcacaagcaggccctgggcaatggcgtccttgcccagtttcagcagttcatccaattcggcctgggagacgtattgcagcaacttcaggctgttactcttgaggtccgccagcaggtcgtacagttgtgtgaaattgtcccaaaggttgtagaacgccttgccgatcccggttgagagcgccaggccttgcattgcactgcgctcgaatggcgtggcgttggcaaagtcgtcccattgcggcttgaaggtctttttccattcatcacgcaggcccctttccagccccgcgatcaccgacagataagacgcatacagcgctttgatgtgatcattcgaaacgttgggataaaaggtgatctgatcgcgggcgcagtcgctgactgcaagaatgccgctggggccgatggtgcgatgaatcgacgggcccaccgggctgccatcaggggcgaccggttgcagcatcaccggcgtattgccgataggcacaaaccgcgtgctctcgaacatatgcaccagggtcaacgagccctgggccttgcaggtggcgaccgtgcgattcggtttcttggaggacgccggagcggcgagggaaacctcgtccccgaccttgaacacctgctcgacttccaatgccgaaccgctccagaagctttcggcccactcgtcaaaggtgttcaggcattcacgcaagtcacgcaggacgccttcaacgtccggcgccttggcatccatgggcgcgaggatgaaacgtgcaataacgggaatcatgaggcggccccgttgagtggggcacggctagagaggtgcatcggcggtccctcgcgctgattgatcaggcgagagactttggagaggttgccagggaaaagaagtcggcgttattcgccgagagggttaggacgtttcgccaaaacctcgggcaaaccgaggctttgttgtaggcagaggattacgggttgagcagtcctacagcttcaactgcccaatcgccttgctcagctccccggccagcgtggccagttcattgctggttgtcgccgagtccacggtttgctgcacggtgttctcggtcacatcccgaatgctcaccaccgcacggttcatctcttcggcgacgtggctttgctgctcggcagcgacggcgatctgggtgttgctttcacgcatctgcgccacggcgctggtgatttcggcgagggcggcaccggcttcctgggcttgttgcacgcagtcgtcagccttgaacgagctttcctgcatgaaatccactgcgtcacgggtgccggcttgcagcgccgagaccatgcgggtgatttcgtcggtagagctttgtacgcgtttggccaggttgcgcacttcgtcggcaaccacggcgaacccccggcccatttccccggcgcgcgcggcctcgatggcagcgttgagggcgagcaggttggtttgttcggcgatgctgtggatcacgctgaccacgccgttgattttctgactgtcctcggcgagcttctggatcatctcggcggtctgttgaacgcccgtggagaggccggcaatcgagcgttgtacgcgggtgaccacttcctggccgctgcccgccagggtgtcggcggtctgggacaggtcgcgggtggcgcccgcgtgctgggcgatgtggtagacggtggcggtcatttcgttgatggcagtggcggcctggtcggtttcgctctgctggccgagcatgccgtgctgcacatcgttcatgctgctggccaaccgtgcggcgccatcgtcgagttgctgggcggtgcgtgccacggtgttgaccacacgctggtagccggcttgcatggcgttgaacgcgctggccatctggccgacttcatccttgcaggccaacggcacgcgggccgacaggtcgccggttttctctacgtgcagcatcacgtctttcaaggtgttgagttggctgagcaggaagcggatcagcagttgcgaggcgccgagcatcgccagcatcaggatcaggactgccaccgcatagttggcaaagcgttcttcgaacacttggctcaggcttggcgcgtaggcgagcacggcgacgtattgaccgtcagggcgggcgatgacttcagcacccatcagcgggttctcaccgaacaacggcatatgattgagttcgacccagcccaggttgctgcccaggggcgacagatcctgctccgccagttgtgggacctggccgcgcttgaacgtcagccagtgctcgcccttgggcaaagcttcgccagtcggccacgcattgaacaaatgtgcctgcgcctgggccgaagccctggatgcatcgctgcgggactgttgctcaagctgcacggcatacagcaccagcagcagggtggtaatgaaggcgaccgcattgacggcccagaatttgtacttcagcgagatattgctaagccaggcacccatggaaggttttctctgatagcggaaacagcattggcaaggtgccattattgtgccgctatccaggaaaacggttttgacatgggtcaatgcgccgcatcaatccattgctggcaagccaaaaaagctgcgggcgcaggccgtgctgtgacgggccaggtcttccaagctctcgttgcggtgcagggcgacttcgcgcagcacttcaggtagatacgcgggctcgttgcgaccgtttttcggttttgggcgcaaggtgcgtggcagcaggtagggtgcgtcgctttccagcatcagacggccacggggaatttccctgaccagggggtgcaggtgtgtcccacggcgttcatcgcagatccagccggtgatgccgatgtgcaagtcgaggtcgaggtagctgaacagcgcctgttgttcgccggtgaagcagtgcaccacagcggcggtgagctggtcgcggtagtccttgaggatgtccagcaggcgctggttggcgtcacgttcgtggaggaataccggcaatttgagctcgacggccagggccagatgttcttcgaggactttttcctgctgcgggcgcggtgaaaaatcccggttgaaatccagcccgcattctcctactgcgcgtactcggttttctttcagcaaaccgcgcaaacgcgatgcgctatcgccgttccagtcaatggccgagtgggggtggatgcccgcggtgctgaacaggcgctggccgctttcatcgagtttttcgcactgcgccagggcctgttcgctgccctcgatgctggtcccggtgagcaccaattgttgcacgccggcagcataggcacgttcaagcacggcctggtgcttctcgtcgaaactggggttggtcaggttgacgccgatatcaatgagttgcatggtgctatctccgcctgcggccggaaagcatatcagagctgtagatttataagaaaaacgaagaactacaacgagttatagctgtctttgaacgtcgcaagcgacattgtggttggcccgccgcctgccaccatgccgccgttgcgtaccttgccagcgcataaagcgctctgtttctgacccccaccgcctcgtttttcgcgagggcgttggccagtattctttccggagagcggatgatccgaccctcggcgttgcttatgttgtgcctgacgatgctgctgcccatggcggcggttgcacgtctggacgggccgctggaagtgaccaggcccggcaaggtccgcgatttggcggagattcgttcaagccgcacgttgcgcgtcttggtcaaccagagccgtaacagttccggtgaggtacaaggccaggccatcggtgtcgaataccatcgcctgcgcgccttcgagcagtacctcaatggccatgcccgtgatggccaggaaatcaacctgaagatcattcccaaggccaaggaccagttgctcggcgcgctggcccgtggcgaaggcgatttggtggcgcccggtgaactgctcgatgtaaaggcggtgcacaagatcagcaccagcgacccgattgccagcgatgtgccgttgtggctggtgggggtgaagggcgagcgacggtttaccaagctggagcaactgtccggccgtaccctggcactgaccaccggcagtgcggcggcggatgccatcagccaggtcaaccagaagctcgccctgcacaagcagccgccggtcaaagtagagtgggtcgacccaacgctggctgtggaagatgtactggagatggttcaggccggtattttccacctgaccattgtcgaaaagccgattgccgagcgctggtcgaagatcctgcccaagttgcgtttcgataagcaggtggcgatcagcgagccgggcgacgaatactggttcgtgcgccaggatgcctcgatgctgcgggccagcattgaccgattcctcaagacctatcgaaccccgtccgaccaggatgtggcgttccagcgtatctaccgtcgcctttatcaagtgcgcaacccattggcccgcgtcgaccgacagcgcctggaaaaactacgcccggtcttgcagaaacacgcccgcgagcagggtatggactggttgaacctcgccgcactggccttcaaggaatcggcgcttgaccctggcgcgcgcaacagtggcggccccaccggcctgatgcagatcacgccatcggcggcgcaacgcgtgggggtcaacaatatcgaaagtctcgacagcaacgtgcaggccggcgcgcggtacctggcaatgatccgtcgcaagttcttcgccagccccaagctcaacgagcgcgagcgcatggcctttgtgctggcggcttacaacatggggccggagcgggtccagggcatgcgtactgaagccaagcggcggggactcaaccccaaccagtggttcttccaggttgaacgcattgccatggagcaagtagggatgggcggcgtcagctatgttaatagcgtcaacaagtacttcttggcgttcgatcgggagcgagcgtcccttgaaccgcaggcaccgaaaatcgcctcacgaaagtaatcgattttatcgatattaatcaggcattttttcggcttttatcattgtctaaactgattaatatagcggccaaccaacccctactttgaaaaggatttgcaccatgagcccactgatcaaaagcattctgtccacccgcgccggttacggcctgactatcctgcgcattgtggttggcatcatcttcgccgcccacggatcgcaaaaactctttggctggttcggcggctatggcctggcgggcactgcccagtggatggaaagcattggtctggcaccgggtacgttgatggcgctgctgtcgggcggtaccgagttctttgccggcctggcgctgatcattggcctgctggttcgcccggcagcattgggcctgaccatcctgtcgctggtggcgatcttctcggtgcacatccataacggcctgttcatggccaacaacggttatgagttcgcactggccttgctcggtggctccctggcggtactactggaaggtgctggcaaactgtccgcagaccgcgccatcgcccactgattgtgctgcaacaccttgaatcggcccgccctgtgcgggccttttcgttgctccggattcttgacaccgccccaccggcttctctaggatgccgttcatgcgccgatttaaacagctaattgcggggcgccatgggtgatcgttatcggtcccgacaggagcgtatttcatgcttcgaaattccgctaaagcgctggttcggtgttgcctctcacctgcccgcagacttttgaggcagagacacgacacgatgaatgcactacgccccctgatacgcctggccccgatcaccgcggaccttactcaacgcaacccgaaaattcttcttggcggcaagcaccagccgacgctattgcgttacctggacggttggccgcgtcgcactggccgaccgtcagcgttcctgatccagtttgttgaagatggcgattcacttgcgcgttttgccagcaacagctttgaccttgcggttatccaggcaccaagcgccaacaatgccaccgaggtcatccgccaattaacccgtattgcacgacaggggctgatagcccgtcgctgaaccttcagtgaatcgtgccgccggcttgcaaccggcgtcggcgctctccaagaaagaccatccaggcgatcaggcataacgtcagcggcatggcaaagatcgccaccagcgttatcgccaactccagatgacgcacttgggcgtaggcttcgcgctgcagggtatgcagctccatgggtaggcgcagacgttccttgttgagtgcttgcagctgggtattggtctccaccgcctgggtgccgagggtggttgtccatgggctcagccgttgccattcctgctctgttcgttgcaagcgtcgctccagttcgctggctttcgaacgataggcctgtcttgcgacctcacgcataccctccagcaccgtcggcggcctttcctgcgttgccctggggcgaatcgcgacgagcatgtcgggggcggacaggttatccagtgtattcagaacaaacagcgcgttgccatcgggcgctgcgtcgctgaccttatcggtaagcatgtccgtatcagcgatgaccacaacatgaatctgcgccgctgtctgcaacccggacggcaggcccttgataccatcgggaaaaactgaatagctcggcccttcgatgcgtgcagcaatgacatggcgctgctcccggctcgaagcctcttcaatcaaggaattgggtgtggttgcgcgagtggattggttggcatccaacagcaccgattgctcggaactttgcaggatcggggtgaaggttgtgcggcttttgttcaactgcgcgagcgtcccactgctcgatacggtcaccctgttgaggttccaggtgctgatgtcgttcaggttcatcgcctgtcgtggcaagttcagcctgactcgattgggcatatcaggcgtctcccagggcgtgtagagagcgtcgaccaccagcttgtccgtcggcatctggataccccaggcggcaagcacctcgtccagtcggctattggctgggagtgggtttgagcgttgttcgctcaaagggtcgatgaacatcatcaatctaccgcccctcaagacaaattgctcaatcccatacaaggtacgttccggcaacatccgtggctgtacaaccatcagggttttgatgtgttcggggatttgagcggcattcggctccagagcgaacagttcgaattctcgccgcaccgcctgcaagagccgacctgcggattcgtccatcgccagccccgacagcagcccaacaaccggtcgctccgggtgctgcaacttgtagagcaggtggcttatttcatattcgagcaacggctcgcgctcgaggctgaaagaaccgatacggcgcacgccatgaccggggctcgtgctgatgagcccgagaaaccctgtgttttcgtcgagccctgacagccttgctttataggcgtcttccgaatagggagcgggttcaatcacgtgcaggttgatcatgccctgagccttcttttcgtactccttgagcagatcctcaatacgtttgccatagcgtttcacggcgtagcttcgtttcgggtcgttatttgaattgaagtaatacacgtccaccgggctttccagcgttgcaagtagtgggtagacggggggcgataaagtgtggattttttgttgagaaagatcccaccgtatatcaggaagtttacctatccacaccaggttgaaagccaggaaaagcaaaaaggtgacgcatagcgtcataccggtgcgcagagtggaccgcattaagggtttcccttctcatctgtgtttgtagttgagcgtgactgtcgttgcggtgagaaaggtgaggatcatgctgataaaataaagtgtgtcgcgcagtgtgagttttccatcatcgatactgctgaatcgccaagtagggctgagggatgccaggctgtcgatcagccatataggggtttggtgttcaagtgagtccaatacataagaaaggccactggctgtcagtaacaagctcagcgtcaatacgaaaatgacagtgcgctgatgcaccagtgcgcaaataaaacagcctgcggataagtaactgcctgccagcagccaactcgccaaaaattgcgaggcaatgacaccgttgtcggccttgcccagatagttcgcaatgatcaccagagggaacattagaaacaggccggtgctggccaccagccaggcggcgaggaattttccgacaatccattcgaacgttgtgatgggcagggttttcatcaggctgaaaaaacctgcgttggtttcatcggaccagagttgagtggtcagggcggggatcagcaataagtacagcgaagggtggaaccggaaaaatacctgtaagtcactgccgttttgttcctgccacggacttacgtacaaccctaatgtcactgagagtatcaggaagatggcaatgttgaggtaagtgccgggggagcgcgcatagctggtgagttgacgcctcagaatgatgggcaatagtctcaatgggacgcctctttggtcagatggtggaccacatcattcaggcgacctggctccaggttcagtgagttgattttccagcgccggctggcaatcagcgtgttgatatggggatagatggtgtgtccgggcatggcgagaaccgtcactgtgccgggcgcgtttcgatgctcttcaatgcctgccacacctggcaggacagccagtgccaacaggtccagtggcgtctcggcagtaagggtgactgcctggaagtgacgcgagtcgcgctgtagatcgggcagtggcgtatcggccaccaggcgaccgttggcaatgaccagggcacgtgtgcacagttcggacaactcttcgcagtgacgcgaggcaatgatgaccgtcatttcttgcgttaacgattggataagcgccttgaatgcgtgcttctgatcctgcgcgagtccttcggtgggctcgtccagcagtaacagggcagggccatgcaggatggcctgggcaattgcgactttgcgtttccaggcgatggaaaggaggtcgaggggggcatcgagtaccgggaacaactccagtcgtgcgacggactgttccaggcggtcacgtttttcggtaccgcgaaagccacgaatggcagcaatgaaatcgaggaacgctttgacggacatcgtcggatgaccgaggtcgttggacagttgatagccgaccagttgccttgcttcgagcgggtgggtttgtgtgtcgaagccgtgaatttttatatgaccgctggacggctgtgtcgaaccggcaatgacatcgagcagtactgttttggccgtgtgatcttgtccgaacaacccgaggcatgcttgttgaccggcactgaatgaaaagtcgcggacaatcgtattgttacccatgtgttttgtcagattgcttacttcgatcattgttttaccgaataagtttggtatgacgtagggaagctgaaaaaagggtacgggttactctcgcttttgggaacgtcggtcagcattaataagagaagtcctacgtgcagggcgggcagaccactgaaacaatgtgtcgtgtcttggagtgtctaatttttgaatgtttatttgttttttatataaactttctttccaaataatgaggcctgattgcatgatgctgctacgtacccttgttcttgagcgaaatggtcaagatgctccggttaacggtgctctgctctgtgggtttgctgtcggtcagacggcctcaaactttcttgtttacagcctggatgaagagatagaacctggaagttccagggtctatattgcggccttgcgtaaaaaacttgaccggtattttctgggaggcgtcgaatccaaggaagacctgcaggtggcattgcatgttttcaagcaaatactgacattagccgcttcgggcgttaaacccggtggtgttaccgaaacccaggtgccttatcattttgtcgatttaaaaggttgcaagttgccacctgccaggcctgaggatcatcactcggtgatcatcaaaaaagcgctggtgatgaaagtgatcaccctgggcatgtctgcgccgacgttgccggctatcgaaagtgcttcagtgatcgtgccgtccattcgtttttcgtcacagatgatttcccctcccagggtggcgagcccctccgagtcgctccgcttaccgtcgcatgagcaaccgcttgaggagccccgacaggtgccctcgggcgcgccggtggacatagcacaggcctcacctgctatctcgcgcgaacccgatgcgccggtgccaacgaaacccgcgccttcagataatcacggtacattgttcgaagtagacagcacgctgaccaaccttgcccgtgtcgctcaagaattgacgcagcaaaaactcgctgcaatcgagcgggagactgcacttgagcagtggcaggcgcgactgcagcaggaacaaaaccaactggatgaaaaggttcgagagctggagcagcgcaccactcaactgcatgatcagtcgcttgcagtcagccagaggaccgaagccttgaaggtgatgacgtcacaagtctcgggcttgcggcagagtttgcgcggcctgttgctggagctggatcgcacgctggacaactagaccggcctggctactttcaccggttcatttatcatcaacgccagccagccgaacccagggcatgaaaccctggcgtatcggcacctatggacattgcctggggatgcaagcgtttgagtaccaagctgattaccaaagaaggccatgaagcgctgaaaaaggagctggattacctgtggcgcgaaaagcgcccggacaccacgcgcaaagtgacgtgggcggcttcgctgggggatcgcagcgaaaacgccgactaccagtacaacaagaaattgttgcgtgagatcgaccgtcgcgtgcgctacctgcgcaaacgcctggaagatatgcgcgtggtggagtacatgcccgagcaagagggcaaggtgtttttcggcgcctgggtggatatcgaaaatgagcagggtgaaaccaagcgttttcgtattgtcggctatgacgagatttatgaccggatggactacatatccatcgattcgcccatggcccgtgcgctgttgcgcaaggaggtggatgacgaggctatcgtgcagacgccaagcggtgacgtgtgctggtggatcaccgggatcgaatatgtgaagtgagcaaaatgggcccgtattctgtaaggaatgcgggcccatcgcgtttcaaccttcgcgcaacaccgtcagcgggctggcattcagcgcgcggcgggtgccgaacacaccggcaccgccgatcagcacggcaccgatcaccgggagcagcaacagccacgggtgagggtgccaggccaggtcaaatgcgtagcggtacagcacgaacgtcaccagctccgtgcccagcgcggccagcaacccactgacggcacccagcaaaccgaactcgatacgcctggccttgaccagcagcttgcgttcggcgcccagtgcgcgcaacagcgcgccctggcggatacgttcgtccagggtggcttgcaggccggagaacaacaccgtcatccccgccgccagcacaaacagcagtacatactccactgcgagggtcacttgggcgaggatgctgcgcaactgctccagcagcgcctcgacctgcaggatggtcaccgccgggaacgcgcgtgacaggtcgacgatctgctggtcatgcccgggtgccagatagaagctggtcaggtaggtggccggcaggtccttcaaggtatccggttggaaaatcatgaagaagttgggctggaagttatcccagttgatcgtgcgcaggctggtgacccgcgcttctcgattctctccgcccacggtgaataccaagtggtcgtcgagcttgagcttgaggctctccgctaccttggcttctaccgagacacccgggatttcatcggtaggttgcgacgaccaccacgagcccgccgtcagggcgttgcctggtggcaggtcggcggcccaggtcaggctcaggtcgcgttgcaccgcacggtcgccgctggagtccttgctgacgatttcctgtaccggttcgccattgatactgatcaggcgccccggcaccaccgggtacagtggtgcggattgcgcctgcagttccagcagacgggtgccaaaggcatccttgtcggccggcaggatgttcaaggcgaaatagttcggtgcatccttgggcagctggttttgccaggtgtcgagcagctcgccgcgcaacagtgcgatcaaacccatggacagcaggatcaagccaaacgccagggattggccggccgccgccagtgggtggcgcagcaactggcccaggcctaggcgccaaggcagggaggcacgggccagcaggcggcgcaggctttgcagcaacagcaggagcaaaccaccgagtaccagcgcagccaccacgccgccaccgagcagggcgaaggtcagcaccaggtcgaggctcaggcgccacatgatcaggcccaaggcgaacagtgccgcgccgtagaccatccaggtgctggaagggatcggcagcaggtcacggcgcaacacccgcagcggtggcactcgacccaatgcggccaacggcggcagggcgaaaccggcgagggcgaccaacccggtgccgatcccggcaaccgccggtagcagcccgccgggtggaacgtctgcgggcaacaggtcgtggagaaagtagaacaggccaaactgcgccagccagcccagcagggcgccgaccaggctggcgaaaagccccaggacgctcagttgcaggctgaacagcaacatagcttcacgtcgtgacaagcccaggcagcgcagcaatgcactggcgtcgaaacgtcgagtggcgaagcgattggccgacaacgccaccgccacacccgccagcaacacggcgaccaggctggccatgttcaggtagcgttctgccttacccagggcgccgccgatttgctggttgccgtcccgtgaatcctgcaggcgctggttggcggcgagccccggcttgatcaggtcacgataggtctgcaacacggtgctgccctgcggcccgcgccatagttcgcggtagctgacgcggctgccgggctgcaccacaccggtggcgtccaggtccgccaggttgatcatcaccctgggcgtgaggctgtagaagttgccggcgcggtccggctcataggtgagcacgcgggccaggcgcagggtcttcatgcccacatcgatgctgtcgccgaccttgaggtccagcgccgtcagcagccgcgcttccacccaggcttcaccgggtttcgggccaccccctggggtttcatcggcaaaaggcgcggctgcgcttttcagttcaccgcgcaatgggtactgctcgttgaccgccttgatgctggaaagctggatgccattatcggtggcgatgacgctggagaactccacgacgcgggcgtgatccaggccaagttcggtgccggaccggatctgctcggggcgggctggcgagctgccttcaagcaccaggtcggcgccgaggaattcggtggcgcgcaacaacatcgcaccgttgaggcgcgcgccgaagtaaccgatggcggtgctggcggcgactgccaccaacagggcgaagaacaacacgcgcaattcaccggcgcgggcatcgcgcattaattggcgcatggccaggctgaacaggcgcaacagcggcaaacgtgccatcaaggctccaggggcgcgaccatcaggccggcttcaaggcggatcaggcgtcggcaacgatgggccaggcgctcgtcgtgggtgaccagcaccagggtcgtgccgctctccttgttgagttcgaacagcaggtcgctgatgcgctcgccggtgtggctgtcgaggttgccggtgggttcatcggcaaacagcacgtccggttcggcggcaaaggcgcgggcaatcgctacccgttgctgttcgccaccggagagttggcgtggcgaatgggtcaggcgttggcccaggcctacgcgctccagcaggtgcctggcacgctcgcgggcgtctttgcggccgtccagctccagcggcagcatgacgttttccagggcgttgaggctgtcgagcaattggaaggattggaatacaaaacccacatgctcggcacggatgcgcgcgcgctggtcttcatcgagggtactgagggcttgcccggcgagggtgacttcgccgctgctgggcaggtcgaggccggccagcaggccgaggagggtggatttgccggaaccggagctgccgacgatagccaggctatcgcccttgttcagttccaggctcagttcgtgcaggatagtcagttcaccttccgcgctgggaaccactttgctaaggttccgcgcggtgagaatgcttgcgcccatggagaatccgatgcgaatgtggtttttgagtgctggcctggccttgatgtgcatggcccagaacgcagcggcgggtacagtcctgatcgttggcgatagtatcagtgccggtttcggcctggataccagcaaagggtgggtggccctgctgcagcaacggctcaagcaggaaggtttcgacgataaagtagtcaatgcctccatcagtggcgacaccagtgccggaggcctggcgcggctgccggcggcgcttgcagagcacaagccggatgtggtggtcattgagttggggggcaatgatggcctgcgcgggcaaccgcctgcgcaattgcaacaaaatcttgcatcgatgattgaccagtccaaggccggtggcgccaaggtgttgttgttggggatgcagttgccgcccaattatggcccgcgatacaccaccgcatttgccgaagtctatggcgagctggccaagcaaaaaaatgtcccgctggtgccgtttttcctcgatggcgtgggcggtcacccggagctgatgcaggctgatcaacttcacccggcggtcggcgcccagggcaagttgctggaaaatgtctggccgacgctaaaaccgctgctatgacgcttttctaccggcaggctttcggctaaggtggcgcccccccgatttggagcccctgatgtcgcgtcctgcctggtccctgtttaactaccaactgatcgagccggacgagcagctggatctgttcgcctgccaggaagtgcgggtgcatctggtggcgcgtcaactggaactgggcggctctatcgatcgcacgctgtgcggcaccctattgccggcgcaaccgcgttggtcgcgggtcgatcgttcgattttccaggaccagcgcctgtgcccgctgtgccgtgccatcctggagtcgcagaagcgcggcacgccgccgatctggccggagctgcgtttcgagttgtagggggcagctagaagcgcgcttcacgtatacaatcgatgtttacctacccgtcgtctgcgaaggatttaccggatgttgtcgcgcctttccgtcgtcacctgctgcctgtctctcgctgcgctttgtgcggccggttctgcgtcagctttgcagttgcctttgcccccaccgggtgaagacatcgtcggccaggtccaggtgatcaaggccaagtacgaagacacctttgccgacctgggcaccacctatgacctgggctactcggagatggtcgcggccaacccgggcgtggatgcctggttgccgggcgcgggcaccgagatcgtattgccgacgcgtttcatcctgccgccggggcctcgcgaaggcatcgtgatcaacctggcggaataccggctctattactaccccaagggtcagaacgtggtctacacgttcccgttggggattggtcgtgaaggctggggttcacccatcgcccataccagcatcattgccaagacgccaaaccctacctggaccccgcccgcctcgatcaaggccgagcacgccgccaatggtgacccgctgcccaacgtggtgccggccggcccggacaacccactgggtccgttcaagttcaccctgggcacgccgggttatctgatccacggttccaacatgaagtttggtatcggcacgcgtacaagccacggctgcttccgcatgttcaacaacaatgtgctggagatggccggcatggtgccggtggggacatcggtgcgtatcatcaacgatgcctacaagttcggcagcagcggcggcaaggtgtaccttgaagcgcatacgccgttgaatgatgacggtacgccgtcggtggtcgacaagcacaccgcggtgatcaacgccttgctcaagcgtgaagacctggcgaacaatttgcgggtcaactgggaccaggtgcgtgacgtggtcgcggcggaagatggtttgccgacggaaatcggtgtgcccggcgcagcgtcggttgccgccagcgcgccgatcgatctgcagcaataaggcgcgacatcaaacgcccgccaaggccttgcgccagggcgggctttttattgcgcgtgattcaggcacaaatcccaggcaataaaaaagccgacccataaatggatcggcttgataacaaccccgagggattattacttgcggctagctttttcaagcatgcgcagagcgcgctcgttagcttcgtcagcagtctgttgtgctttttgagcagcagccagagcttcatcagctttacggtaggcttcgtctgcacgggcctgggagcgagctgctgcgtcttcagttgcagtcagacgagcttcggtttctttggagacgctgctgcaaccggtagccagaactgcggccagagccagagcagagaatttcagaacgttgttcatcgtgttccccttcaaggactttctattagatggctagtatctcagagtgagccaatagccggcgtacatactacccattacttgtagtaagtaaactgacgtagcgcaagaagcaaaaaaaattctcgtgccgaatctattttggctaatcttttggagttttgtataaaaactgtccaatttttttaaccaggcgtaaatcggatccaggctgaaagggccggcccgcatgtgttaagccctgtaaacagatgaaattttatatatccacgccgacacttacgttcagcatggcttcgcgttgcccggtatcttttgcgcatgtagaggtgactttaagagcgcctgttcgtctcaaggttcaactgccggcaatgttcaggcgttcgatcatcggtagatcgaagccctttctatatccacccgtggcaggggatgacgagtgcgccttgagcaattgcaggattggtgcctactattccctacgtgcaggtgtgagcgctcagggttttctcgttgtcgaaaccggcacggggtggcgtagatgttccttcgccggaaaaacatcggtaaggtaggggtcagaatccaagacccgcgaggagtagtgatgagcgaggcgttgtccatccaccatgaccaggctggtcatcagttcgagaccaatgtggacggtcatcgtgcctatctgacctatatggatctcggcaaacagaccctggatatctatcggaccttcgtgcccaacgcactgcggggccgtggtattgcggcggcactgaccgaggaagccttgaagtttgccgaggaggcgggctacacggtgatcccgtcctgctcctatgtcgaacgctacatggagcgccaccagcgccatgccgcgaagttgtaaggcacaaatagcagcatgaaaaacgccgggctcagcccggcgtttttgtgtgcgctctataacagactcaggtgcgcttgcgcttaggcagcacgtccttgagcttggcgtgcatgctgcgcagtgtattttcggtggcggcccagtcgatgcaggcatcggtgatcgacacgccgtactgcaagtcggccaggtcttttggaatcgcctggcaaccccagttcaggtggctctcgaccatcagcccgatgatcgactggttgccttcgagaatctggttggcgacgttttccatcaccagtggctgcagggccgggtccttgttggaattggcgtggctgcaatcgaccatgatgttcggcttgatcttggccttgttcaatgcctgctcgcacagcgcaacgctgaccgaatcatagttgggcttgccgttgccgccgcgcagtaccacgtggccgtaggcattgcccttggtggtgacgatggacacgccaccttcctggttgatacccaggaaacggtgcgggctggaaaccgattgcagcgcgttgatcgccacagtcaggccgccgtcggtgccgttcttgaaacccacggccgaggacaggccggacgccatttcacggtgcgtttgggattcagtggtgcgtgcgccgatggccgaccagctgatcaggtcctgcaggtattgcggggagatcgggtccagggcttcggtggcggtgggcaggcccatctcggccaggtccagcagcaactggcgaccaatgtgcaggccgtcctggatcttgaacgagtcgtccaggtacgggtcgttgatcaagcctttccagccgaccgtggtgcgcggtttttcgaaatagacgcgcatcaccaggtacagggtgtcggacacttccgccgccagcaccttgaggcgctcggcgtactcgtgggcagccttgagatcgtggatcgagcaaggcccgatgacgacgaacaggcggtggtcggtgccatcgagaatgtcacggatgacttcgcggcccttggtgacggtctgcagggcagcgtcgctcaaagggatttcgcgcttgagctgatcgggcgtgatcagggtctcgttggattcaacgtttaggtcattgatcggtaaatcagccatcgtgttactcgtcagggtcacgggtgccggccgccagccatccccgtgcggcggagcacagcatgatttgaatgcaggggggaggaaccttagcgcgtaacaccggcccgcgacaatgggcaaagcccgctttaatccagtgctggcgccacaaaggcttcgtgggagaactcgctggcatggcgcgatacccactcacgggccagggcttcgagttgctggggtgtcggttcggtgtcttcgtgctggcggcagtagcgctctatccggcatgcttgctcacccatgcgtgcaccgaacaacgcatgttcatcggtaaacgagacaccgacgcggtagccgttttccaccttgcggcaccacgccacatagcctggataacgtgcgctggcacccagggacgggatatgcagatcaaccgccgtgccttcgcgccaggcgcgtggccaatggcaggcgatgccgcccaggccgatagcgtgcaggcgttggcgagggatggcgggagagggacgttggattaactcgacagcgacatcatcagggtgaggtaaaaaacgacccatgtacacggactccgagcaccgtccaattgacggcggtggcagcagtatagtgaaggaactggaattgaccgacctggatattgaccagcaattgctgggattgccaggtatttctctggtgatctttaccagcgcagggtgttccagttgccgctgggcacgccagcaagtgccgggctggccgttaccggtggaccggctgtgctgggtggacgccgggcacaacggtggtgcggtcgaacgctaccagatctttcatttgccggcgctgttcgtggtgtgcgagggtcaattccttgggcaaatacagacacgtcttacgcgtgacgacgttttcgatgccgtaaaacaggcactcacccgtccaactgaggatttgccatgacagcagttacaccccagccaccacgcattggcatcatcggcaccggtgccattggtggtttctacggcctgatgctcgcccgcgccggtttcgatgtgcactttttgttgcgcagcgaatacgcggcggtcagcgagcacggcctgcacttgaacagcaccgtgcacggcgtatcgcatctgcatcccgtgcaggcctacgcccgcgctgctgatatgccgccatgcgactggctgctggtgggcaccaagtcgaccggcaacgtcgaattggccccgaccctcgcccaggtggcggcgccggatgccaaggtggtgttgctgcaaaacggccttgatgtggaagacagtctgcgtgaacacttgccggcgtcgctgcacttgcttggtggcctgtgttatatcggcgtgcaccgttctggtccgggcgttatcgagcaccaggcgttgggccgggtcaatctggggtatcacagtggcaccgcggccaatgatgacgcccgccaaaaggagattgtcgacgcaggcgccgcgttgtttcaccaggccggtatcgagtcgcaggccatggccaatgtgcatctggcacgctggcacaagctggtgtggaacgtgccttacaatggcctgtcggtgttattgggcgcggggacctcggcgatgatggcggacgaatccagccgcgaactgatccaggcgctgatggccgaagtggtgcagggtgcccacgcctgtggtcatgagattccccaaagctacgccgagcagatgtttaccctgactgaaaccatggacgattacctgccgagcatgtaccacgaccacgtgcacaaacgcgcgctggaactggcggcgatctacgcccgcccacttgctgcggccagggctgccggctgtgagctgccacggatgcaggcgctgtatcaggccttgagttttattgatcggcgtaaccgctgagcagggggacacaccatggcaaagggattgggcgacaaactggtgctggcgatttcgtcgcgggcactgttcgacctcagcgacagccacaagatctacctcgcccaaggcgtcgaggcgtaccgcaagtaccagatcgagcacgaggaggaaatcctcgaacccggcgatgcatttccgctggtcaagaaactgctgagcctgaacgccagcctgggccgtgcgcgggttgaagtggtgctggtgtcgcgtaacagcgctgacaccggcttgcgcgtgttcaattcgatccagcattacggcctggatatttcccgtgccgctttcgtaggcggtcgtagcccttatccttatttggcggcgtttggctgccacctgtttctttcgacccatgccgaggatgtacgcagtgccctcgatgcggggttcgcggcggcgacgattctgtcgggcggcccgaaccgcgcatccagcgaagaactgcgcattgccttcgacggcgacgctgtactgttttccgatgagtcagaacgtgtgtaccaggccggtggcctggccgcgttccaggccaatgagcgagaggcggcgcgccaaccgttgcacggcggtcctttcaagggttttctggcggcactcaacttgttgcagcgcgagtttcccgatgaggcctgtccgatccgcaccgccttggtcactgcccgttcggcgccgtcacacgagcgggtgattcgcaccttacgtgaatgggatatccgcctggacgagtcgttgttccttggcggcctggagaaatctgcattcctggaggcgtttgccgccgatgtgtttttcgatgaccaggccgggcattgcgagaaagccatggaatttgtcgccaccgggcacgtgccccatggcatcagtaatgaggtgaagatctagggcgctgctaagctgatttcatctccgccatcctggcagtccaggaggttctatgatccgttcgatgctgtacgccacggacctcggtctgtacgcgccttatgtgatgcaacatgcgctggcgctggctcgaacgttcaaggctgacctgtatgtgattcatgtggtcgagcccatcggcctgttcgccgaatcggtgttgcagagctaccttgatgagaaggccttgagtgagtggcaaagccaggggctggctacggtcatggcgacgatcgaacagcgggtgctggacagttttcgcgaagagttgggggacgaggggcaggacctgaagttgattcgctcggtacgggtgatccagggggacccctgcgaggtgatactcgaccaactgcgcaaactttccgtggatctgctgatcgtaggaagtcacagccatgcaaccgcggcggctaccccgttgggtcgtaccgctgcacgggtgctgcagctgtctacggtgccggtctacctggtgccttcgttgcaacgtcgacgcagtgatgacgtgtgatggatgaaaatcgataaaaagttctagatttatccataaaacctttaatatagttatataccgtcgctgatacccgtggcgtctatctgctttgagggacacatatgaagcttcaacaactgcgctacatctgggaagtggcgcaccacgacctcaacgtttccgctaccgctcaaagcctctacacctcgcaacccggtatcagcaagcagatccgcctgctcgaagacgagttgggcgtcgaagtgttcgcgcgcagcggcaagcacctcacccgtgtcaccccggccggtgagcgcatcatcaccaccgccggcgagatcctgcgcaaagtcgaaagcatcaagcagatcgcccaggaattctccaacgagaagaaaggcaccctgtccatcgccaccacccacacccaggcacgttacgcattgccgccggtgatccgcgatttcatcaagcagtacccggatgtggccctgcacatgcaccagggttcgccgatgcagatcgccgaaatggccgctgacggcaccgtcgatttcgccattgccaccgaggctcttgagctgttcggcgacctggtgatgatgccgtgctaccgctggaaccgttgtgtggttgtaccgcaaggtcaccccttggccaagctgccgaagctgaccctggaagccctggccgaatacccgatcgtgacctacgtgttcggtttcaccggccgttccaagctcgacgaagccttcagtcatcgtggcctcacgccgaaagtggtgttcactgccgccgacgccgacgtgatcaagacttatgtacgcctgggcctgggcgtgggcatcgtcgccaagatggcggtcgacacggccctcgacaaagacctggtggtgctcgatgccagcgagctgttcgagtccagcgtgaccaagatcggcttccgtcgtggcaccttcctgcgtggcttcatgtgcgatttcatcgagaagtttgcgccgcacctgacccgtgaagtcatggccaaggcgatccagtgccacaacaagcaggagctggaagaactgttcgacggcgttgaattgcccgtccattaagccagcggtttatttggcctcggtaaccgtaaaatgttgccgggcgcctgccaccagaatctccacctcatcgccttcgaacttgcccagcaggcttttgcccagtggtgagcgcggggtgatgacggtcaacggttgtccaaccacgtcaaccttcaaaccggccgcatccggcgccaggaacagccattgctggcgactgctctcatcttccaggcccagcagggtgccgacttctataccgcgctgatcatcgtaggcccgtaatggctggttctggcacagcgccaacgcctgcttgatctcctcgacgcgcttggcttgcccggccgccaggtaggatgcctccagcccgagggtgtcgtacttgttttcagcgatgttttcttcgtgggtcgcggtttcgtaggcggtctgcgcggcgcgctgggcgatgtcgaggtcgacgctgagcttttccaggatgagcaggtggacggcgtgtttattcatggtcatcaatcgcagaattgcaggacattggcccgggtcttttcgttgggagcgttctggtcctgttgcagccagaactggcatttggggttggacaggttgcgcgcattgttgcgcgcctggtccaggctctgttgctgctcctgtttctgcaggttctgctgatactgctcgaacatgcgattcggcagttcaggcgcggccaccgcaggcttgcccaattgctgcactgcctgggccaccggcgccaggctctgggggaacaggtagcgcgacgccagccaggtggtcagcacgatggcgataaaccccagccatacgccaaacgagatagcggcactgagcttgaacagcgacaacggacgatcagacatgaggccctcctggcaggcattgacggcgtggcggcgattgtcgcacagccaccgtgcagaataatcgtgatcaagccttctgcatccgcacatttatgcggacaatcgaacctttgagcgttggagcccggaatgaaagcccgctgggatattttttgcagcgtcgtcgacaacttcggcgacatcggcgtgacctggcgcctagcccggcaactggtggcggaacacgcctgtgatgtgcgcttatgggttgacgacctgcgcgcattcgaacgcatgtgccctgagattgatgtgcagctcgatcaacaatggcaggaaggcgtcgaagtgcgtcattggccggccgagtgggtgggcgcgcccgcggcggatgtggtgatcgccgcgtttgcctgccagttgccgcctgagtatatggaggccatggccgagcgtgaacgcacgccggtgtggatgaacctggattacctgagtgccgaggaatgggtcgtgggttgccaccggctgccgtcggtgaagttcaagggcgtgcagaagtacttcttcttccccggattccgccccggcaccggcggccttttgcgtgaggccgggttgctggaacagcgtcgggcttttcagcaggatgcgagtgcgcagcaagacttcctgcaaaccttgggtgtgtttcccacagccggtgcgcggctgatctcactgtttgcctacgaaaacgccgggctcgccagttggttggacgagttatcgacggacgggcgtgccactcatctattggtgccggaggggcgcattctgggcgatgtgcagcgctggctgggtctggatcggctggtggcgggggatatccaccagcgcggctcgctgaccgtgcaggtcatcgctttcgtgcgccaggaacaatacgaccgcctgctgtggtgctgtgacttcaatgccgtgcgcggcgaagactcgttcgtgcgcgcccagtgggccggtcgcccgctgctgtggcatatctatcgacaggacgaagatattcacctcgacaaactcgatgcctttctggatctgtacaccgccggtttgtcacccgctgcaaggcaggcgttgatcgggctctggcaagcctggaacacggagggcgatatggcccaaccgtggaaaatgctgctggaacattggccggaggtcagccagcatgccgaaacatggtgtctggaacagggcttgcaggccgatcttgcgacggcgctggtgaagttttatgaaagttggatatgatacgccaccttgaattttgtaaatcccatccaaatttcggatatatgcaatgaaaactggtaaagaactgaaacccggtacagtgatccgtctcgaaaacgacccttggctggttcagaaagctgagttcaccaagtctggtcgtaacagcgccatcatgaagaccaagctgaagaacctgctgaccggttacaagaccgagatcgtctacagcgccgatgacaaactggacgacgtgatcctcgaccgcaaagaagcgaccctgtccttcatcagcggcgacacctacacgttcatggacaccaccgactacaccatgtacgagctgaacgctgaagatatcgaagctgttctgccgttcatcgaagaaggcatggaagacgtctgcgaagctattttcttcgaagagcgcctggtttccgtagagctgccgaccaccatcgtgcgtaaggtggcctacaccgaaggttccgctcgcggcgacacttcgggcaaggtgatgaagcctgccaagctgagcaacggtaccgaactgcaagtggccgatttcatcgaaatcgacgacctgatcgagatcgatacccgcgaaggcggttcgtacaaaggtcgcgccaagaagtaattctggccccgccgctacgaaaaaaagcccgaccttgtgtcgggctttttcgtgggtgctgcctttacttcaggtgttgcttcagttcatccgaggcctgtagcagtgcggagcgtacggccggcacctggctgaccacattgagcaaaccgtagtcgtggatcatgccgttgtagcgcaccgccgtcaccggtacacccgcctggtccagtttgcgagcgtaggcttcgccttcgtcacgcaacacatcggcgccggctgtctggatcagcgcaggcggcaagcctttgagctggtcggtggtggcccgcagcggcgaggcgtagatctcggcgcgctgggtggcgtcggtggtgtagttgtcccagaaccacttcatcatgttgcgggtcaggaagtgcccttcggcgtactggttgtaggacgctgtgtcgaaattggcgtcggtcaccggccatagcaacaattggaacttgatcgccggcgtgcccttgtccttggccatcaggctgaccactgccgccatgttgccgccgacgctgttgcccgcgaccgccaggcgcttgccatcgacattgatctctttaccgtgctcggctacccattttgtggcgccgtaggcctggttgatcgccaccgggtaatgggcttccggcgaaggcgtgtagttgacgaacaccgccactgctcccgaacccaccaccagatcccgcaccaggcgctcatgggtcgggtaatcccccagcacccagccgccaccgtggaagaacatgaacacaggcaatgtgcccttgaccccggctggccgcacgatggtcaggtccagcggcttgccgtcgacctggatggtcttctggctcacatccgccttgggcaaggtcagcttcacaccggcctgggcgccggtcagtacggcacgggcgtccttgggcgtcagttgttccatcggtttgccggtgcctgcgttcaacacatccaggaaggactgggtgttgtgctcgacatcacctgtcgccgcaaaggcgtgggtgatggacaaggcgagcagggtgccggtgagcgctttaccaattgtgttcattgctttctccaggggcggccgagggcatttagacggtcacgtgcaggcgaacatcgacgttgccacgtgtggcgttggagtacgggcagacttggtgagcggcgtcgaccaggctttgcgcgtcgtcctgggccaggcctggcaggctgatgtgcaggtcgatgtccaggccgaaaccgccggggatctggccgatgccaacgtgggcagtgatcgacgcgtcatccgggattttgcgtttggtctggctggcgacgaatttcagggcgccgatgaagcaggccgagtagccggcagcgaacagttgttcggggttggtggcctggccaccggcaccgcccagttctttgggggtggagagtttgacgtcgaggatgttgtcgctggaaacagcacgaccatcacggccgcctgtggcggtggctactgcggtgtagagcgtttgcatggtgttttcctctttgttgttagcgctaaatgtttgcgcgctaagtagttggtgaggcgaatgtatagcgctaatgtttagcgcgcaagataaattttcaaattttttcaaattcaacctgcaggggccggcttggcggctcctgcaaggggagaggtttaaacgctggcttgcaggttggcgcgcaacgcgatcaggtcgctttgcaacttgcgcaattgctccagctccaggccgctggcacccaggatgcactggggaatgcccatggccttgtcttgcaacgcccggcctgcgtcggtcagctccaccaccaccacgcgttcatcttcacggctgcgggtacggctgagtacaccttcggcttccaggcgcttgagcaatggggtgagcgaacccgggtcggtcagcaggcggctgctgatttcgccgacagtcaaaccatcctcttcccacaacaccatcatggccaggtactgcggataggtcaggccaagcgcttgcaacaacggcttgtagaccttggtcatcagcagcgaggtggagtgcagggcgaagcacagctggttatccagcatcagcgattcgcacggatcagggttcttactcatggctgtacctcgaaaaagcatgtctgggctggaatctagcgggcaaatctttaatgcgccagataattctgtccgagcggtcagaccaagccactctgtagcgccaggtcccaaggtggcaccggactgaagcgcgatttcagatattccagcagcagtcggctgcgggcattgggctgctgttccaggcgcagcgcatagatgccggtggtctcgggactgggcaggccgccttcgcagaacaaaggtagcagttcgccgcgcaccaggtattcgctggccagccacgtggggaggtgggcaatgcccagcccggccaaggcgccagacaacaaggcttcagcgttattggcgctcatgcggatgcgctgcggtcgataggtggcacggcgcccatccagctcgaagcgccaggcgaacgtcggcgccaggccatcccagtccaacccgtcatgttcgctcagttcccgagggtggatcggcgtgccccggcttttcagataggccgggctggcgcacgcgatgcgcacgatgctggccaagggcgtggcgatcaaccgcgtgtcgacgagatggccggcgcgcagcactaggtccaccttgcccaggtgcgcgccctgcatatccacaaagctgtcgatcagatgcaggtgcacatccagtcccgggtagacattgaggaaatccgcgatcaccggcgccagatgccgtcgaccaaatgccgctggtgcatcgactcggatgaggccttccggcgcatggctgagggacaccgcttcggcccgcgccagttgcagctcgctgacaatccgccgtgcccgctcggcgaaggccaggcccgccggagtcggcactacggcgtgggtgctgcgctggaacaagcggctgccaaccgagctttccaggctgtcgatccgccgggctactgccgagggcgtcagcggatgacggcgtgcggccgcggagaaactgccggtttccagcacatcgagaaacaggctcagttgatcggtcagaggattggggttcatcgtaacgtcgcttatgcgagattggcacagccattgtgcgttgctgtgcgtttccgcgccagagccgactgcgtagcatgcaaggcctgggattgcggagtaacaagcggtgttggatttagtgatgtacctgatcttgggcgcggccctcggcacggtgggcggcctgtttggcattggcggtgggttgattgcgatcccggtgctgggcgtgttgttcggcctggaccagcaattggcccaaggcaccgccttggtaatggtggtgcccaacgtgatgctggcgctgtggcgctatcaccagcgcaaccgtatcgagctgcgccatgcgttgccgctgggcgtcatgggtttcacgtttgcctggctgggttcgatctgggcggtggggctggatgcgggtgcgatgcgcatcggttttatcgccttcctgttgacgctatccgcctataacctgctgcgcatgttcacccgtaacgcgccgccgacggcgcagatgcgttattcctggccatggcttggggtactgggtgccgcctccgggtccatgggcggtttgtttggcgtaggcggggcagtggtcgcaacgccggtgttgaccagtttgttcggcacaacccaggtggttgcccaaggtttgtccctggccttggcattgccgagcaccggcgtgacattggtcacctacgcctggcaccaggaagtggactggatgatcggcgtgccgtttgccgttggcggcctgctcagcatcagttggggcgtgaaggtcgcccatgcattgccggagcgcgtgctgcgcggtctgttctgcggcttcctggtggtgtgcgcggtgatgctgacttttaaagtttgaatccttcgaggatgtactccgccaggcagtcggtgatgggggaggtcatcgccgggttgcgtagcaatcgaagcgtcatcgatggcagcggcggaaaaccttcttcgctgccgagcacccgcagatcgtcggtcaccaggctttccatgctgaccattaccgccaggccggaactcaccacggcctgaatcgccgccacgttggaactgtggtaggccagtcggtagtcccgccccgcggcgtccagtgccgcacgggtccactgggtgcagaagctgtcgaccccggaaattgccagcggcagcgcgtcgtgttcgtccacgcagaagcacggcgcggccacccacaccatgcgctcggtgcgcagcaactcgccaatttcattgccgggttcgcggctgataacggtcagcgccaggtcccggcgctgcatcaacaccgtcgacgcctcgcagtgcatctcgatctggatcagcggatatgccttggaaaaccgcttgaggatgcctggcaggaaacgcatcacgtagtcgtccggcgtgccgatgcgcaccaacccgaccatgtgcggctcgcgcagggtgttgaacacttcgctgtgcagtttcaggatgcgccgcgcatagcccagcaagacctggccctcgggcgtcagccgcacctgccgaccatcgcgttcgaacaacttgcgctgcaatacgtcttcttccaggcgtttcatctgcatgctcaccgccgattgtgtgcggttgacccgttcgccagcgcgggtaaagccgccctcgtcagcgatggcgacgaaggtgcgcagcacttcagtgtcgatgctcgggtagccggacaattgatcaatctccgagatgcattgcataaaaaacattcgttggattgatcataaggccaggcacacacttgcgccatccccactggagggcgagaagatgaaaggtcaaagaggttttgtattgctggcgaaacgtccgtttgccgggctgtttcacaaggttgcgcgctggcaggcgctgcatgaggagcgccagatgctggcgaccttgagtgatgatgcgctcaaggacatcggcctcaatcgcggcgacgtggagcaggagcgccacctgcatttctggcaagacccgctgcgaaaataatcgcggatgcagtagggtagtcggcgagtccccacggagaaacccatgcccgccgacctgtctttttcactcaagcaagctcgacgcatggcgctggcggcccagggtttttccggacgccaggcgcctgcactgatcaaggctgcgcacctcaaccgcatgatcgagcgcctgggcgtgttgcagatcgattcggtcaatgccgtggtgcgctcccattacctgccgctgttttcccgcttgggcaactactccccgctgatacttgaacaggccgcctggagccaggggcggcggcgttcgctgttcgaatattgggggcatgaggcatcgctgttgccgatggcgctgtacccgctgatgcgctggcgcatggagcgggccaggcaagggcagggcatttattcgcaaatggcacgttttgggcgtgagcaacaggccactattcagcgggtgctgcagaccgtcgagcaacagggcgcgctgggtgccggcagcttgtcgacccgcgaggagcgcgccggcccgtggtgggactggagcgacgaaaagcacgcgttggaatggctgtttgccgctggcctggtcacggtcgccggccggcgcgggttcgagcggctctatgatttgccggagcgggtcattcccggcgatatccttcaaacctctgtgactgaaaccgaggcccagcgcggcttattgctgcacagcgccaccgcgttgggggtcggtactgaaaaagacctgcgtgattacttccgtctcgacccggccgacagtcgcactcgccttgctgaattggtggaagacggtcgattgttgacgtgccaggtacaaagctggaaacaaccggcgtactgcctgcccgatgccaaagtgccgcgcaaagtgccggccagcgccttgttgtcgccatttgattcgctggtctgggagcgcagtcgcaccgagcggctgttcgacttccgttaccggctggagatctataccccgcaagacaagcgggtgtacggctactacgtgctgccgttcctgcacaacgagcggatcgccgcgcgcgtcgacctgcgtgccgaacgcgccaatgggcgcctggcggtgcatgcggtgcacgaagaagagccggggttggatgaggaagggatgttggcgctggcgcagaacctgcggcaaatggccgactggctggggctggagcaggtgcagctcaactgccaaaggcccagtgccgaccggttgcgggcggcgatgatcagcatgggggttggtctttagggcctcatcgggggcaagtcgaatcgtcgcaccgcccctcccacacttgaatgtattcacagatcaaaatgtgggagggggcttgcccccgatgaggccctgaaggcaactgaaaactcagcgtttgacttgcttcaatgtctcggcaatcagaaacgccaactccagcgactgatcggcattcatgcgtgggtcgcagtgggtgtgataacggtccgacaatccatcctcggtgatcggccgcgcgccaccgatgcattcggtgacgttctgcccggtcatctcgatatggatcccgcccgcataggtgccttcggcctggtgcacctggaagaattccttcacctcgcccaggatctgcgcaaagtcgcgggtcttgtagccgctgctggccttgatggtgttgccatgcattgggtccgagctccacagcacttgcttgccctcgcgctgcacggcgcgaatcaggtggggcaggtgatcgccgaccttgccggcgcccatgcgcgcgatcaggttgaggcggccggggtcgttgtccgggttgaggatatcgatcaggcggatcaggtcatccgggttcatgctcggcccgaccttgaccccgatcgggttgttcaccccgcgcaggaactcgacgtgggcaccgtccaactggcgagtgcggtcgccgatccacagcatatgcgccgagcagtcgtagtagtcgttggtcaggctgtcgcggcgcacgaaggcttgttcatagttgagcagcagcgcttcatgggcggtgaagaagctggtctcgcgtagttgcggcgagctgtccatgccgcaggcgcgcatgaaggccagggtttcgtcgatgcggtcggccaactggctgtacttctcggccagcgcggagttggcgatgaaatccaggttccacttgtgcacctggtgcaggtcggcaaaaccgccctgggcaaaggcgcgcagcaggttaagggtggcagtggactggtggtaggactgcagcaggcggtccgggtccggcacgcggcttttttcgtcgaaaccgatgccattgacgatgtcgccacggtaggcgggcagtgtgacaccgtcgatggtttcatcattggccgaacgcggcttggcgaactggcccgccatgcgcccgaccttgaccaccgggcagccggcggcgaaggtcatcacgatagccatttgcagcagcactttgaacgtgtcgcggatttttgcggcggagaactcggcaaagctctcggcgcaatcgccgccttgcagcaggaatgcgcggccctgggtcacctcggcaaactggcggcgcaactcgcgggcctccccggcgaacaccagtggcgggtagctggccaggttctgctccacttgcagcaagtgtgcagcgtccgggtaccggggttgttgctggatcggcagggcgcgccagctgtcggggctccagggttggctcatcatgaactcgattggctgattgacggtggggcgccaatgttatcagcaattagtgcgtgacctgttgccgtcggttggccgacaatcgcgcctttgccgtgcagcaaacccgttaggagtagtgatgaccgaggagcgtgtcgagcgcctgctggccgaagtccatgatgatttcggcatgatccgtgtgctcgaagtggccgattaccgttttctcgagtttggcgacgccatcgagcaaagctgcgtgttcaccgctgatccgagctggctggagtacgactacacccgtgcgatgctgatcggtgcgttgtgtcatgaacaacccgagagcgcgctgttcctcggcctgggcgccggcacgctgacccaggcgtgcctcaagttcctgccgctggaagatgtggaagccatcgaactgcgccccgatgtgccacgtctggccattgagttccttgggctggatgacgacccgcggctgtacatccgcattggcgacgcattgcaattgctggagaccgccgagtcggccgacctgattttcgtcgacctctataccgatgtcggtcccggcgtcgggcatctggcgtggaccttcctggagaactgccagaaaaaactcaaccctggcggttggctggtgatcaaccaatgggccaccgatgatggcaagccgctgggcgcggcattgttgcgcgggttgtatcaccgtcattactgggagctgccggtgaaggagggcaatgtgattttgctggtgccttcggagctggatcaggcgctggatctggaggcactgtccgctcgcgccgaggccctggcatcgaagttggggtattcgttgcagccgttgatcaaggcgattcgcccggcgacctgagctagatgcctttgaatatgccgggtcgcttctcaatcattgcccgcacaccttccttggcatcctcactgttgagcaatttgtccaccatcggcggcaacgcctcagccgccacggcttcgccttccatgcgcgccagccgtgccgacatcaacgtagcctgcacgcccagcggtgcctggcgggcgatgcggttggcgagttcgacggcgcggggcagcaagtcctcgctggccatcacttcctgcaccaggcccaggcgcagggcttcatgggcatcgaattcgtcgccggtgagcagccagcgcatcgcgttgccccagccggcgatctgatgaaggcgcagcgtcgcgccgccgaacggaaagatgccacgctgcacttccatctgcgcaaagcgcgtgttgctcgcacagaggttgatatctgcggccagcatcaactctatcccgatggtcaggcagtagccctgggccgcgacgatcaccggtttgctcacgcgcgggccggcaaacacgccccacggatcacaaccgcccagaggcggctgccagccactggccatcacgctgctgacattggccaggtccagcccggcggtaaagtggtcgccatgggcaaataccacggccacccgagcgtcgtcatttcgatcaaattcgccatacgccaggctcagctcattgagcaggtcgaggtcgaacgcgttgcgtttggccacccggtccagacccaaaagcaagacatgaccctggagttcacggctgacgcggctgctgctggcttgattcatcgggtgtgccctcgggcgcggggaaaggtttcggaccaaaggaccgcaaaggtcaggtgaaccgtttaagcgttatgaccagcagggccgggcctctgaaaaatagaccctggcggtgttatctgcaaagactgtgatgcagcgcggtttatcggtgccttacgataaaaaaagctccctttttcagctatttccggtatagtgcgcgccggcctttaaccgggccgcgtttaggtagcgcaattccccgaagtcagcttcggctgcacgtccgcacagcggactctcccttgacgaatctttttcattcattcgttttcgcaaatccccgccgacaaagcagccagggcgactcttgagtctcaacacggcatgcgcagctttggagcatgggtctttgcggatgcacttagaggcagacccatgacccaggaaaccggcggcttcgccgcttttaatcttaacccgaatattcttgcagcagtcgcagcgaccggctacgaagaaccttcggcgattcagcagcaatcgatcccgatcatcatggccggccaggacatgattggccaggcgcaaaccggtaccggtaaaaccgccgcgttcgccctgcctatcctgcattgcatcgatcctgccaagcgcgaaccgcaagccctgatcctggcgccaactcgtgagttggcgctgcaagtagcaaccgcttttgaaacctacgccaagcaaatgccaggcgtaaccgttgtggccgtttacggcggcgcgcctatgggcccgcaactcaaggcaatccgcaatggcgcacagatcgttgtcgccaccccgggccgtctgtgcgaccacctgcgtcgtgacgagaaagtcctgtcgaccgtgaaccacctggttctggacgaagctgacgaaatgttgaagctgggcttcatggatgacctggaagtcatcttcaaggcactgccaccgacccgtcagactgtattgttctcggccaccctgccgcagtcgatccgtgccattgccgaacgccacctgcgcgatccgcaacacgtgaaaatccagaccaagacccagaccgttaccgcgatcgaacaggctcacctgttggttcacgctgaccagaagacctcggctgtattgagcctgctggaagtcgaagacttcgacgccctgatcatgttcgtgcgcaccaagcaagcgaccctggacctggccagtgccctggaagccaagggctacaaagccgctgcgctgaacggtgacatcgcccagaaccagcgtgagcgcgtgatcgactccctcaaggatggccgcctggacatcgttgtagcgaccgacgttgctgcccgtggcctcgacgttccacgtatcacccacgtgttcaacgttgacatgccatacgacccagagtcctacgtgcaccgtatcggccgtaccggccgtgccggtcgcgaaggtcgtgcactgctgctggtgactccgcgtgagcgccgcatgctgcaagtgatcgagcgtgtgaccggtcagaaagtcgctgaagtgcgcctgccggatgcccaggcagttctcgatgcccgcatcaagaaactgaccaacagcctggcgccactggtggccgacgctgaatcgacccacggcgacctgctggaccgcctgaccgccgacatcggttgcaccccgcgtgccctggctgcagccctgctgcgcaaggcaaccaacggtcaggccctgaccctggcggccatcgagaaagaacgtccactggtgccgaacagcgcgccacgcggtgatcgtccagagcgttccggcgaccgtccagaccgtggtgatcgtgagcgtcgtgctccggttccattggctgaaggccgtgcgcgttgccgtaccgcgctgggcgcgcgtgatggcattgctgccaagaacctgctgggcgctatcctcaatgagggtggcctggcacgtgaagccatcggtcgcatccaggtccgtgacagcttctccctggtggagctgcctgaagacggtctggaaaaactgctgaccaagctgaaagacactcgcgttgccggtaagcagctcaaactgcgtcgctaccgcgaagattgatccgcccttgggctgattgatcgcaagtaaaaaatccccgactggttcggggattttttttgcctgaaacttaccttagccgaagcggtagatgtccatgcccagcgcgcccatggtgaatccctggtgtgccacgctgaattcgccaccggcacctcgtgcaaagtacagcggcagcaagtgttcatcgctgggatggctgcgcacggcattcggtgccaggcggcgatagtcgtgcagcgcggtttcatcgttggctgccagcttatccaccacccaatcgcggaaatcccgcgcccatggctcgatgctctccggtcccgcgtgccagtccaactcgcccaggttgtgggtgatgctgccagagccaatcaacaacacaccttgctcacgcaggcccgcaagagcatgcccgacgcgggtctgcagggcaggccccatacgactgggcaacgacacctgcaccaccgggatatctgccgccgggtacatcagcgacagcggcacccaggtgccgtggtcgaaggggcgacggtcatcgatgcgcgcaggcaggccatcggcgtgcagcagctcgacaatcttgccggccagctgcgggtcacccggtgccgggtactgcacggcaaacagcttgcgggggaagccgccgaagtcgtgccaggtttcgggcgcggcgctgccgctgaccaggagttcagagctttcccagtgcgccgacaccaccacgattgcctggggccgtggcatctcggccgctagccgttgcagcgccgggccactggcgccgggttgcagggcgagcatgggcgatccgtgggagataaacaggctggggagcataagtagggtcctgagcgttaacatgggcccatcttcaatcagatcattgatctaaatctaatataagttttagtgccatttgatcgaatttcatggaggatctatggagcctaagttttggcaggagcgctgggcgaataatcagatcggctttcacttgcccgaggtcaacccctacctgcaacggcactggccgcggttggccgatggcgccaaagtattggtgccgctgtgtggcaagagcctggacctgatatggctggccgcccaaggtttgcatgtgctcggtgtagagctttctgagcaggcggtcgaggcgttcttcaacgaacaaaatctcgtcccgcgaatcaccgaacgtggcgcgttcaaggtgtaccaggcagatttgatcgaagtgtggtgcggcgacttttttgccctggagcctgaagtgttagctggttgcgctgcgctttatgatcgcgccgcactgatcgctttgccgccgctgatgcgtgcgcaatataccgagcatttgaatgcttgcctgcgtcctggctgtcagggcctgctgatcacccttgactatgaccagacgcaaaaagccggcccgccctttgcggtggctgacgatgaggtggcggtgctgctcgggccgcactgggcgttgaaggtgcttgaggagcaagacatcctgggggagagctggaagtttgtgcaggacggcgtcacacggctggatgaacgggtgtatcagttaaccaggcgctgaatttaccgatcgctatcgggggcaagccccctcccacttttgatgtgtgaacgcatgcaaaatgtgagagggggcttgcccccgatgaggccttcagacctgcaaaaaaggggcgatcagatcgccccttttttgtgttgctgtcgcctgtcagccccgacgacgcaacgcgtcgatccgttcttccagcggcgggtggctcatgaacaggcgagccatgccctgcttgataccgccgttgatgccgaaggcggtcaggctgtccggcatatgcaccggcaggccttgttcggagcgcaggtgttgcagcgctgcgatcattgccccggtaccggccaggcgtgccccggcttcgtctgcacggaactcccgtttgcgcgaaaaccacatggtgatcgcgctggccaggaaacccagcaccacttcggcgaagatggtcgccacgaagtaggcaatgccgcggccgccttcgttcttgaagatgaccttgtcgacaaagttgccgatgatccgcgcgaagaacatcacgaaggtgttcaccacaccctggaccagcgccaaggtgaccatgtcaccgttggccacgtggccgatctcgtgggccagcacggctttcacttcgtcgtaggagaagcgttccagcatgccctggctgaccgcaacgagtgcgtcgttcttgttccagccggtggcaaaggcgttggcttcataggccgggaagatcccgacttcaggcatcttgatgccggcctcgcgcgacaactcctcgacggtttgcagcaaccattgctcatgccgggtacgtggctgggtgatgacctgggtgctggtgctcatcttcgccatccacttggagatgaacagcgagaacagcgagccggcaaaaccaaagaccgcacagaagaccagcagctgattgaggttcaggtcaaccccgttggccgccatgaacccgttgaagccgaaaaggctcaaggtgatgctggcaatcagcacgaccgcaaggttagtggccaagaacagcaggatgcgcatcatggttgtagagttctcctcatgcttaatatgtcgcgtactgcggggtatataaggtgccgcatggggtgattcaaccgagcgactatttcaaactgtgtcctacagcctgaatgtagaggcttgaagggaatttccgatagggaaaaggtcgtttgatcggttcaccgttgccttgaagccctgtgattatggggtgtggggggctttttcggcgccagcgaggtggcaaggtagaagaggggcagagaagtgttgccagatactcgccgtacgaccgattgtcggtcgtacggcgccgtttcccttactggcgataggacttgaggaagttgccgatacgaccgatggccatgtccaggtcatccacgcgcggcaacgtcaccacgcggaagtgatccggccacggccagttgaacgcggtgccttgcaccaccagtagcttttccgacagcagcaggtcgagcacgaacttttcgtcgttgaggatcgggcataccttggggtcgatccgcgggaacgcatacagcgctcccatgggttttacgcagctgacgcccgggatcgcattgagcagttcccaagtgcggttgcgctgctccagcaggcggccttggggcaggaccaggtcattgatgctctggtagccgcccaaggcggtctggatggcgtgctggctcggcacgttggcacacaggcgcatgttggccagcatgtcgatgccttcgatgtagctctgggcgttgtgcttgggaccggagatggcgatccagccggagcggaaacccgccacgcggtaggacttggacaggccgttgaaggtcaggcacagcaggtctggcgccagggaggcagtgcatacgtgcacggcgtcatcgtagaggatcttgtcgtagatctcgtcggagaacaccaccaggttgtgctggcgtgccagctcgagcatgcccagcagcacttccttggagtaaacggcgccggtcgggttgttcgggttgatgatgaccagggccttggtgttcggggtgatcttggccttgatgtcggccaggtccgggaaccagtcggcgccttcgtcacacaggtagtgcaccgggtggccaccggccagggtcacggcggcggtccacagcgggtagtccggcgccggtaccagtacttcgtcgccattgttgagcagggcctgcatggacatcacgatcagttcggacacgccattgcccaggtagatgtcctcgatgccgacaccttcgacctgcttctgctggtagtactgcatcacggccttgcgcgcactgaacaggcctttggagtcgctgtagccttgggcagtgggcaggttgcggatcacgtcctggaggatttcgtccggcgcttcgaaaccaaagggcgccgggttgccaatgttcagcttgaggatgcgatggccttcctcttccaggcgtttggcgtgcttgagcactgggccgcgaatgtcgtagcagacgttggcgagcttgttcgatttgctgacctgcatggcgatgtgatcctgaaaatgaacgatccagacggtgtgggcactaccgtactgtgaatcctgcgaaggccgcacccataaatacgtttgaatgccggtagcgcgggtgccagactggcgttttgaagaggcgcaatcatacgtgccgcctgatccatggaaaagacacagatcaggctttttcagttgccgaggtgtaccgatggaaaagttgcagaaaacgctggaggaatggcgggaaatgctcgaccccgcgcaatatcaggtgtgtcgactgaagggcactgagcgcccgttctccggcaagtacaacgccaccaccacggatggcgtgtaccactgcatttgctgcaacgaaccgctgttcgattccagcaccaagttcgatgccggttgtggctggcccagcttctacgagccgatcgccgacagcgcgatgatcgagatccgtgacgtcagccacggcatgatccgcaccgaagtcacctgcgccaaatgcgatgcgcatctggggcacgtgttcccggacggcccgccgccgaccggcttgcgttattgcatcaactcggtgtgcctggacctcgtcccgcgttgaattgaacggcgcggcaccctgtaggagaccggattactggcgatggcgatctcacggacgctatcgccggcaagccgggctcctacaagggaggggtgatagcgagatatcaatttcgccaattaaattgagtacaatttaattgcatactatctttttccttcttccccccaatcgaggcactgccatgagcaacaacctgctgagcatcccttgcaccaccatcaagggtgagcaaaagaccttggccgatttcgccggcaaggccatcctcgtggtcaacactgcaagcaagtgcggtttcactccacagtacaaaggcctggagcagctctggcagcagtacaaggaccagggtttggtggtattggggtttccttgcaaccagtttggcaagcaagagcccggtaacgaaggcgcgatttccgaattctgcgagctgaattttggtgtcagcttcccgctgttcaaaaagatcgacgtgaatggcagcgacgcccaccctttgttcgtacagctgaaaaagcaggcaccgggcctgctgggttccaaggggatcaagtggaacttcaccaagttcctcattggccgtgacggccaggtggtcaagcgttttgccccgaccaccaagccgcaggacctgacccaagagattgaagccctgctcaaatgaccgtctccctggcgctcgaccatcaactgtgtttcaagctctacgcagcgtcgcgggcggtgacccgtgcctacaagccgatgctggatcaactcggcctgacctacccgcagtacctggtgatgctggtgctatgggagtggcatgccgcaacgccggcgcaacccacggtcaaggccttgggcgaacgcctgatgctcgactctggcacgctcacgccgctgctcaaacgccttgagcagctcggctgggtcaggcgccagcgcagcgccagggatgagcgcgaagtgcacctgggcctcagcgaaagcggtgtgcaactgcgtgaccaggcccatggcctgaagacccggctgctgtgcgacagcggtatcgacctgaaccaggccgacacgttgcgcgatggcctcgaccagttgctccggcagatcacagacttgtcgccttcggcacccacaggtccagcaatccgctgagctcctcgcggcgaaacggcttggccaggtagtcattcatgcctgcggcccggcaacgctcgcgttcttccgacagggcgttggcggtcagtgcgacgatcggcaggtccggccagcgcccgctgcgacggatctgtcggctggcctcgtaaccatccatcactggcatattgcagtccatcagcaccatgtcgaagggttgttcctcaagcagcctgagtgcttcgccaccgtgggcggccacgatcacctcacaccccagtttgccgagcatgcccttggccaccagttggttgaccgggttgtcctccaccagcaggatgcgcgcccggtgcatcaggggcgcagcgtccatctggatcgggtcgaggatcagttgcgcttcgctgcgcaggttacgttgcaggatctgatacagcgcgttgcggctcaacgggcgcgcctgttgctgcaacggtgccagtgccgcgacttcttcgctgggcatgaaattgccataggcggtcaccagcaggatgggggcgctaatggcggggcgcaggcggaacaggcattcggggcagtcggtgatcagcaggtccggggtttgcccgctcaagtcatcgtcttgcgtatagcagtgcggtgtcagcccccagtggggcagcagggtggtgagcagctcggtcaggccactgccgacactggtaatggcgatgacgtcacccttgagcggtgtcggttgcaccgcaggcaaatggatcggcaacggcaagtctgcgcagaattggctgccgaagcccacctccgagctgatgctcaagcggccctgcatggcttcacacaggttgtgcgtcaacgccaggcccaggcccgtgccgccaaactgacgggtgatgccggcaccggcctgggtaaagggttggaagattttcacctgggcttcctgcgcaatgccgatgccggtatcacacacctcgatgcgtacccggccctcctgcgcgctgaggcgaacatccacacggccgaagcgcgtgaatttcaaggcgttggacagcaggttactgacgatttgccgcacgcgggtcgggtcacccaagacctgggcgggaaactgcgggtcgatcaggcaggtcagttcgacgctcggcgccgcgttctgcgacagcaggttggcggtgtcttccaccagtgaacccaggtcgaacgggatgtgctccagctccaactggccggcgtcgaacttggacaggtcgaggatatcgttaagcaattccaccagcaccttgcccgagtcatgggcgatggacagttgctggcgttgctcggcgttgagcgggctgtccagcgacagcgcgatcatccccagcaggccattgagcggggtgcgaatctcgtggctcatgttggccaggaaggccgcccgcgcctgggccatgcccagtgcatgcatctttgcggattccagttcatcgttggactggctcagccgctggttgctggccttgagctccagggtgcgggcggagacgatgtcttccagttgccccaggtactcggtcagccgatcttcagcgtgacggcgttgctggatctccgtctccatgttctcgaactgctggttggcaacgttcaccagcacgccgatctcgtcgtgctcgtggcccggcgggcagtccaggcgggcctgccggcgattgctgagctcgcggatgatgcgcaccaaaggctgggtcaacatcacgtagaacaggcccagcaggatgccggtcagcaacaggctgcgggcgaagccgttgagtagcgtgatctcggcacggcgcagaaagcggctgccaaaggcgtaggtgtccacatccaggcgcagcaccccaagggactcgttgggcatgtgactgaggaacagccggtcctcaaactggcggttggcaccgaacaggaagtcgctgataggacggtaggtgctttctttgcgcgggctgtcgacatcggccagcaccacgccgttgttgtcgatcaactgggcgtgaacgatggcgggggagtgcaaaaggcccagggtcaattcctgggccagttcggcgtcgatgttgtaggcgatgcgtgacgcggggttgtggctgatttcgatcagcgagcgaatttcacggttgatggatgcgtcttcgctggcataatcgataccgatttggatcaggctgagcaaggttcccaagacgaaaccgaccagcacagtcaatctggcttgtttataagacaagcggtgggcgaacttgatatccatcgagtgttgaaccacttcacgtttcccttcgcccggcaagcatagctgaacatccacaagctctggcttacccggcatgaatcgttttttacgcagcctcgtgcggtctgccgcagggttgccaatacgccatcttttgcaagaacttgccagaggaataatcgtggactctcgattgaatgcctttcttgaacgggctgaaaccgtgctcgcccgcctggagccgttgttgcccgcgccgcgccaagccatcgattggaaccagtgcctggctgcgcgctggcagcgcgaaggccgcagtggtttcctgttgccgctggacgtgagcctggacatgcgcctgtccgacctgattggcgtggacaagcaacgtgaaacactggcgcgcaatacccagcaattcatcgatggcctgcccgccaaccatgcactgctgtggggttcgcgtggcaccggtaaatcgtccatggtgcgcgcgttgctggcccagcatgccaaggcgggcctgcgcctgatcgaaatcgagcgtgatcatctcgctgatctgccgcgtgtggtcgagcaactgctcaagttgccgcagcgctttatcctgttctgtgatgacctgtcgttcgaggccggcgaaggcgattaccgcgtgctgaaaagcgtgctggacggctccctcgaacaggctccggaaaacgtgctgctgtacgcgacctccaaccgccgtcacctggtcccggagaaccaaagcgacaatgacaactggaaacgcgtggatggcgagctgcaccccagcgaagcggtggaagacaagattgccttgtccgaccgttttggcctgtggctgtcgttctatccgtttacccaggagcatttcctggatgtggtggagcactggatcggtgagctggcgagcaaggccggtttgcaatggcagcgcgatgaagccctcgacatcctcgccgtgcgctgggcgaccggtcgcggcaaccgcaacggccgttgcgcgtaccaatttgcccgttactgggtaggccttaaattgttggagcttcaaccatgatcgatctaaatagcgcaggcaccggcctggatggctatgcgatgctctgcgcgcaactggagtcgctgctggccgatgagcgcgacttcatcgccaacagtgcgcagttctccgctttcctgttcaatcaactggacgacttgaactgggccggcttctatctgaaccgtaacgaagagctggtgctcggaccgttccagggccagatcgcctgtgtgcgcattccctttggtcgcggggtctgcggggcggcggccgcaacgcggcagacccagcgggtggaggatgtgcatgcgttccccgggcacattgcctgcgacagcgcatcgaacagtgagctggtggtgcctttggtcaaggacggcaagctggttggcgttcttgacctcgacagcccgtcgctcgcacgctttacgctccaggaccaggcgggcattgaacagctggcggcgattttcctgcgtctgaccgactgctgatcacgcaaggggcagcaatgccccttactgaccctccgggctgtggagttgcacttgcagcaaccgctccagttccagcatgaacttttccagggttttcgcacccgcctcgattaacgcccagtcatcaccacgggcacacgcctgttcgagggtttcgcactgcccggccaatgaggccgcctgaacaatacgggcggcacccttgatcttgtgggcctgctcaatgatctcctgaagcggggcgtgtgcggttatcagcgcggtcagtgcctggcgatcattccggctgctgctcaacagctcctccagcagtcgcccattcaactgtggatcgccgccggtcaacgcctcgaagttgccaaggtccaggtgcaagtccactgttttaggggcgatctgcgccagttgccgctccagggtcgtgaggctgatgggtttgaacaggcaatcgttcatgccggcctgagcacagcgttgtttctcttcaggctgtgcattggcggtaaacccaagcaccacgcacggtgccagttgctcgcgctgttcgtattcgcgaatcgaacgactcaactcgtagccattcatgatgggcatgttgcagtcggcgatgaccaagtcgaagcgttcctggcgccatgcctggaaaccggctgcgccattctgggctgcggtgaactggtggcccaggtagcccagttgctggcacatcagcaagcggttggcgggatggtcgtccaccaccaacacattgagtaccggcgtggttgcgggcttctcgggtttctgttcatcggctgcctgttccggctgcagtcgcggcattcgcaggttgacatgcacctgggtgcccaccatgggcacactgctcaggctcagctctccacccatcattgcgcacaggctgcggcagatcaccagccccaggcccgcgccgctcctggcgagctgcccggaattgtcggcctgggcaaagggttcgaacaggcgtttctggtcatcgcggctgatacctatcccggtatcctccaccaccagcttcatctcgacctgttgcgccagttcggtgggcaatacgtcgacgcggatttttacctggccacgttcggtgaacttgatggcattgctgatcaggttcgacagcacctgcttgaagcgcagcgggtcgatcaggacttcggtgtcgtcctggtcgggtttgaactcaagggacaggctgagggttttctggcgcgccaggccgtcgaagacacgcaccaccgactcgatcacctcgcgcaggttgacccgttccggcgccaggctcaggcggccggactcgatacgtgcgatgtccaggatatcgccgatcagctccagcaggtccttggccgagttgtacgcgacttcgatggccgggcgatccaggtggccatggtcggcgcgtttgagggtcagctccagcatgccgatcaccgcgttcatcggcgtacgtatttcatggctcatggtcgcgaggaacgtgctcttggcccgattggcttcgtcggcgcgctctttggccgcgcggatctcatcgaacaattggcggcgctcgctgatgtcaatccagccaccgatgatcccttgcacctccccggtagaatcgcggtagggcaggatccagtgatagatcgtcagtttttccccgcggatatgcagggtgcggtccaggatcagcgggttaccttcggccattacccgctggtagtcggcatggtactgctccgcgtccgtctccagggtttcgctcatctgcagggcacttttgccgatcacatcctcgcgcttgacctcaaacacttgcaggtagctgtcgttgcaggtctgcagcaggcctttacgatcacgcacatagatggggtgcggggtttcattgaccagcgcgcgcatgaattcgaactgatcgttgagggcccgctcggccatcttgcggtgcttgatctgacggcgcatgtaggcgttccaggccagggagatcagcagtagcagcccggtgccgatgatgatacgggctatcagttggtggtagtcgcgccagtagctgtcggaggcggcggtgtagccccgccagcggctgttgatcacccccagttcatccggggcgatgctcaacagggccttgtcgaggatcgagctgagttcggtggcactgcgcgatgtggccagggcaaacatggccgggaaggtgccgatgctcgtactcatctgcagcttgtcctggaacacctgggacgacaggaagtagttggcgaccaccagggagttcaccgcgccttccacgtgtccctgggccaacagttccgaagccttgaaggtgtcgctggcttttaccagttggacctggggaaagtcgcgacgaaggatagcctccagagggttgcccggcgtgattgccaggcgtttgccggccatctgctccaggttagagggggcattgggttctttgcgtgtcagcaggacataggagttttccaggtagggccggctgaagttcagttgcgcctcccgctcggcgctgggcacgatggccccgataatgtcggccttgccggtgtccacctgctcgatcattgcattgacgtcgcgttcgcgctggatctcgaagcgcagcccggtgcgcaggcggaccaactccagcaggtcggcggtgatgccgcgaaagttgccgtcggcatcaaaaaaggtcaggggtgcgaaggtttcattcacaaccaccttgactaccggatggtctttcaaccagcgctcttcgcgttgggtcagttgcagtttctggtcggacagcaagatgtcgctgccggcgctccagcgcttggcgatcatttcccgttcgttcatgggcacggtggtcagaaccgcgtcaacaatactcaagagggtgcgctggtgttggggcatggcaaagctgaacccgtaggcttcgtgtttaccgaagttggccatgcggatgttcttcaggtagcccttgttgatcatgtaatgggtggaaatggtatcgccgaggaacacgtcagcctggtcgaacgccaccgcattcagggcattttgataagaggggtaggcacggatgattgcctgggggtacagcttttccacttcgtccaggggcaggtagtggtagaccagggccaggcgcatgccggccaggccatcgttcaggctgcgggtttcaccttcgcgggtgaccagcaccggttggtcgacggcatagggttcggacagcgtgaggttcgggttcgccgcctcgaagccgttggaggagcccagtagatcgatatccccggcttcaagcgcgcggatcgccgcttcacgggaaggatagcgcagtactttcactggcaaggccagcgccttggccaacaggccggcgtaatcagcggtaagtccttcgtagtcgcgaccgctggacgtgaggtcgaacggaggatagtcaggggccgcagtgcccaataccagttcgcgcttgttttgcagccattggcgctgggccttgttaaggtttgtttccagttgaacggagcctgcacggctcaacaaggtgaaatgttccgggcccgtttgatggttcgcgagcacggcggtgctgaagcacaaaccggcactcaatataatcagatagtcctttatacgcctgggcatccgctttctcacactagcgcgtttcgttttgccatctcgataagttctaccaaggatttggcttgaagtttttgcatcagcctctttttgtaagtgcttactgttttgttgctcaggaacataccttttgcaatttccttattggtgcggccttgtgcaaaaagttgcaaaaccataagttcgcggtcgttgacgttcttgaacagttcaagttcctgggagtcgcagccgtctgcaccactgctgttcagtgcctggctgggaaagtagttgtagccggacaacaccgcgcggatggcgctcagcaattcgctcaggtcgccttccttgcacacgtagccatcggcgcccgagcgcatgcagcgtgtggcgaacaaggtgggggactgagccgtcaggatcagggttttcatttgcgtgttcatggcgttgaaccggcagagcacttcgagcccgtcgagcttggggatgctgatatcgaggatgatgaggtcaggcaagcattcgcggaccatttgtatggcatcgcatccgttgtccgtttctcccaccactttgtaaccttcgtgttccaacaacattcggatggcaagccgtataaccgggtggtcatcgataataaaaactgagttcatgatcacattccgtgcaagtgcaaataaagcgggcacattagctcagaaggggaggcgggagcatgagctcaggggggagtagatataaaacaggaaagttcctacattaaaaaaggtaaaggcctacccgttgctcaggctgtgcgaagtgatatgccagcgcttgtgagatgaatgaattaaatcttgccgctatggaattagctggctcggtactgagctttttcttcggggcctgatgtttaaaatcctacatgtgtgacctgagtaatgggcagatcaaacgtgccagctcatctttgttgagcggttttgacaaatagccgagcaatggcaggccacggtccaccgcttggtctatcagggcggcgagttctgtcgcgggcagtccactcaggaggatggcagttgtggtaaagcgtcggcgactggcgatttcaatcagctcgagtccaggcaggtcgggcaggcattgatcgcacaggatgatgtcgaagggcatctcggcccgcgacattaaacagatagcctgttcggcgttctcggcgggggtcacccgtgcgaagccgaagcttctgagcaggcactgggtggcgaggagttgaaagggatgatcctccaccagcaggatacgaagcggataactgggcattggggggcacacggtgagtcaagcgtcgatggagggcgcgtaggaacagttcgcctgggtcgcccggagcgtgcgtgagtattcattgggtgcttgtgcgaattcgatcaggccgctctgttcccttcgtaggtcgattcctttcgggcaacaggcggcttgatcgtgctcgtcattgggggctggagcgcccggtcatttcccgggccatttcggtggcatagctgtcggtcatgccggcgatgaagtcgatcatgcgcaggaacgaggcgtgcaaaggccaatgggggttcggcgcgttgttacccagcaggtcgagaatgcgccgattcttgaacgacggcgtacgcccgccatgctgctccagggctgcaccgcaaaaggcgttcagcagaatttccaaggtggtgtaggcgccgatttcatgcaatgtcttgcgcttgtcctggaagatcttcttgcgtgccatgtccttggcgtccagcacgcaacgcttggccgggccgtgcatgtgctccaccaggtcgccgggcagggtgccggcgagcaaggcatcctgttgttcgacaaaggcccgcgcggccgcgttggtcaggtgttcgatagccttgccgcgcaggatcgccaacttgcgccgccgcgagtcctgcgcaccgagttgacgataggtctgcggcaggtcatcgcctaccaggtcgagcagcaacgactcgacctcggtgtattccagcaactccatttccaggccgtcttccaggtcgatcaaggcataacagatgtcatcggctgcctccatcaagtacaccagcggatgccgggcccagcgctgttcttcgagttgcggcaggccgagcttgtgggcgatctgctcgaggatcggcaattcactctggtaacagccgaacttgtgtttcttgtagcccagggagtcggcgtggcgggcggtccaagggtatttcaggtaagtgcctagggtggcgtaggtcaaccgcgtgccgccgtcgaactggtgatattcaagctgggtgagcacgcggaagccttgggcgttgccttcgaagttgaggaagtcattacgctcggcgctgctcatgtcatccagccaaccgcggcctgcggcctgctggaaccaatggcggatggcgtcttcgccggagtgcccgaacggcgggttgccgatgtcatgggccaggcaggccgattgcaccaccatgcccaggtcgctcgggtcgcaccagtcgggcagggcgctgcgcagggtttcgccgacgcgcatgccgagggagcggcccacgcagctgacttccagggagtgggtcaggcgcgtgtggatgtggtcgttgctggagaccgggtgcacttgggtcttgcggcccaggcggcgaaatgcgccggagaagataatacggtcatggtctttgtggaacgggctacggcccagttcttccgggctgtgcagcggtttacctagacgttcgcgagtcagcagggtgggccaatccaaggcgggtactctccgtgcggtgaatgaccctcccagcttcccggttcagcgcgggctgggcaagcgaaaatctacagcccggccgcgtcgatatcgattaacagcaaacgctgaccgttatcaaagaattgtccggcggtgaggcaatactggttggtggtcgcgtcgcggtaggtcgaggagagggtcagacggcgctcgtcccacccttcggccaacaggtgatagaagtacgggcgccacgaccagttgtggcccagataaaggctgtcggcctgccaggcgtcctggcgccactcgaagttgggcgtcagctgagtgccgtgtcggtcgcattggtagaagcgcagcagccaggggaaagccggcagttggggcaactggctcagcggcgcttgtgcctgagcccaggtttgcaggattttcatcagctcggccaattgctggcgcaattgcatgatgcgcccgcgttccgccagtttttgctggacgtaggccgtgcgcaactgggcaaaacgtggcacgaaggcgtcggcggcaaaccagtccaactgtgcctgggcaaacagatagccctgcacataccgcgagccgcactccagggcgaagctcaactgtgcttcggtttccacgccttcggcaatgatccagcagccggttttctcggccatctgtgccagcgcccgcaccacttcgctgctgggcccaccgcgggcggcttcctggaacaggcgcatgtccagcttgagaatgtccggttgcaatgccagcacccggtcgagttgggaatagccggcgccgaagtcatcgatggcgatacgcgcaccggcctcgcggtaacgcgcgaccacgtcggccaggcgttggatgtcgccacccagttcggtgatctcgaacacgatccgctgcgggtcgacaccatggctatgaatctgtttcaggctcggcagggcttggcccggacgcaggcggttgatccagcgcggtgagatgttcaggctcaggaaccagtcggcgggcgcttcatgcaggcggctcagggcattgtcgcgaatctgccggtcgagacggcgcaaggtcacgcccggggtgcgcgggtcggcgaacagcggccccaccgattgcaggcgcccgtcggcctggcgcagtcggccgagggcctcgacgccggcgatgcggccggtggcggtatcgataaacggctggaagcaggcgagcggttgcccgtcgatcacggggcctccttaagcgaggtggctgaaaaaaaggcccggccctcgaaaacgagggtcgggccgattctgttagcaagaatgcagccagccaggctcaacttttgcgcgaagtgccctgcatggccaatttgatcagcgggatcaagccggcaccgagacgcaccaggcgtgtcaggctgctgataccgccgcccttggcgcctttgccggtaaaaaagcccatcagcgtcaccgcagccacgccccacagcggcgcgtgcttgatgcccaggctgtcttgccagtgactgcccaggttgcgcaccttgttcaacggcagcatcaattgctgggactcgtggcggatttcctgacggtgcatttccatgcgcaggcggatcaacgccttgcgcatttcccgccgtgacgtgttttttggcatttcagtcaggctcatggcagcaagcgctcccgatcattggccagttcttcgagggtggcatggaacggcgtggattcatcgaacaccgccgctttcaagcgcaccccgcaaaaggctgcggccaggctgtagaacacgcagaggcagatgatgccggtcaggcggtagccggtgtcccacaccaggatcatcaccagcgtcgacagccccaccagcaacagcaatgcaaacaccaatgccaggccggcaaacagcagcaggctgacggtgcgggccttctgttcctgcaattcgatgccaaacaattcgacgtggctgtgcagcaagcccagcacggccgcgcccagacgccttgaggtagtgcccgtggacgagccagtttcgccgatagacatgatttagcgccttgtggccagcaggccgatcagaaagcccacgccggcggcaatgcccaccgactgccaagggttggcctgcacgtaatcttcagtcgcggtgacggccgcctggccgcgttcgcgcagcgagtcttcggtcagttgcagggtttctcgggccttgagcaggctttcgtgaatcttgctgcgcagctcatcggcctggtcacctgccagcaccttggtgtcatccagcaacttttcggtgtcgctgaccagggtttgaaaatccgccatcagtatttcttgcgcagtctttgcagttcttctggccatggttatctccgtgatgggctgttttgtacgtagtggtttcgagtcaccggcgtcggtgaaggttcagtgcaattgtgtggtacagcttttgctttgccttggtgcgcaggccttgctgcctgcgctgaatccgggcggtcgggcaggaagccttgaaaaaccttaccctaaataactgaaactcgcggaaaaaccctgtcggcaacgacctgatgcgttgatcgctgcgctaaatcggttcacgccctctgaagaggggtggggccggcggtgccaatttagtgcgcgcaacccaggtttgaaccgctttggtgctttttgcctttactgcaggcctgccaacctccatggaaaatgtgcaaagtgcggtggacaccctgatccacagctccaataccctgtttatcctgatcggcgcggtcatggtcctggccatgcacgccggcttcgcgttcctcgaagtcggcacggtgcgccagaagaaccaggtcaacgccttgtcgaagatcctcagcgacttcgccatctccacactggcctatttctttataggctattggatctcctacggggtgagcttcatgcaaccggcggcggtgatcagcgccgaccatggctacggcctggtgaagttcttcttcctgctgacctttgcggcggcgatcccggcgatcatttccggggggattgccgagcgggcacggtttgcgccgcagctctgcgcgaccgcgttgatcgtggcgtttatctacccgtttttcgagggcatggtgtggaacggcaatttcggcctgcaggcctggttgctcgcgacgttcggcgccagcttccatgatttcgccggctccgtggtggtccacgccatgggcggctggctggcgctggcggcggtgttgctgcttggcccgcgcaacgggcgctaccgcgaagggcgcctggtggcgttcgcgccgtcgagcattccgttcctggcattggggtcgtggatcctgattgtcggttggtttggcttcaacgtgatgagtgcgcaaacgttgaatggcgtcagtggcctggtggcggtcaactcgctgatggccatggttggcggcaccgtcgcagccttgatcattggccgcaacgatccgggtttcctgcataacggcccgctggccgggctggtggccatttgtgcgggttccgacttgatgcacccggtgggcgcactggtcacaggggccgtcgccggtggtttgtttgtgtggttctttatcgccgcccaggatcgctggaagatcgacgacgtgttgggcgtgtggccgttgcatggcctgtgcggcgtgtggggcggcattgcctgcggcatcttcggccagacggcgctgggtggactgggcggtgtcagcctggtcagccagttgatcggcaccgcccttggcgtgttggtcgcgttggccggcggcctgctggtgtacggcgtgatcaagcgcgtgcatgggctgcgcctgagccaggaagaggagtattacggcgcggatctgtcgatccataagatcggcgcggtcagtcaggattgatcggctcgtctgcctggcgataaaaaccgtgcagcaggcggtagcggttctgtcgtacttcatcgacccgcgcctgcacctgttggtccggcaggcccaatagaatcagggcgtgggaggcaagcatcaggcttgactccaatagttcgggcaccacttcgctggcgcctgcggccttcagctcagccagttggctgtcgtcgcgggtgcgtaccaggatcggcacttcggtgttgatccggcgtgcttccttcaacaccaccagcgcgacatcggtgttgtctacggcaatcaccaccaaccgtgcgcgctccaggccgaccgcactgagcaatgcgccacgccggcaatcaccgtagtgcacgctgctgtcttcggtggcggcttcctgtacccgttccgggtcgtcatccagagcgatgaatgcctgttgttccttgcgcagaaagcgtccgatggattggccgacgcgaccatagccgcagatcaccgcgtggccgtgcagctcggcgttgagcgcggtgatggcttccagttgcacttgctggttgggcttgcggtgcaggcgcagagcaatgcccggcgcggcacgcagcagcaggggtgtcagcagcatcgagcagaaggtggcggcgagcagcaagccgttgaattcatccgggatcagtcggctctgctgcatctgtgccatcaacgcaaagcagaactcgccgccctgggccagtgccaggccgctgcgccaggcggtttcgctgtcgctgccgcgcagcttgaccagcgcggcgaccacacagcccttgaccagcatcagggtgagggtcagggcgaggatcaacaggctgtggctgacgaacagttgcaggtcgatgagcatgccgatactgacgaaaaacagccccagcaggatgtcgcgaaacggacggatatctgcctcgatctgatggcggtagtggctttctcccaacagcatgccggccaggaacgcgccgagggcaggggagagccccagcaggtgcgtgagccaggcggtcagcaacacaatcaccagcgccagcagtacaaacagctcggccgagtgcgaggcggccacctcatgaaacaagcgcggcagcagccagcgactggcaagcagcaggccgacaaacaacaccacggtcttgcccagggtcagtggcagcgcccagtaccaggcttgttcgccggtgccggcaaacaccggcaccagggtcagcaacagcaccgccaccacgtcctggaacagcaacacgccaatcgcgttctggccatggctgctgaagatttcaccgaggctggtcaactccttgctgacgatggccgtggatgacagcgccagccctgcgcccagtaacaacgcgatacccggcgccacccccaggatcatcaacaagatgcccagcagtgccccgcagcccaacacctgcagactgcccaggccgaacaccacgcggcgcagggcgagcatcttggtcagggaaaattccaggcccagggagaacagcaggaacaccacgcccagttcggcgaggtcgggcagctcctcgctgtcattcacccagtccagcgcggtaggccccacggccaggccgacgcacaggtagcccagcacgggcggcagttgcagccggcgaaacagcgcaatcaccaccagggatgaggccagaatgatcagcaggttggcaaacacacgcatctccattgcaagggggcaggcaaaaagccgcgagaatcgctgaaacagttataggccatggtgacctgggtcagggttttcaggggctggtttctcgccacaggttttcgtcaggcttagaatgttggcctactttctgatcaggtccattcgtcatgcttcctgaatgccagttgttcggcaccctgggttgccatctatgtgaaattgctgaagccgaaatcatgccgctcgtcgaacacgggttgctggtggagctggtggatatcgccgaccccgacgacctgaccgaagcctacggcctgcggattccggtactccgccgggtggacacgggggcggaactggattggccatttgactcacaacaggtcgtggccttccttcgttgagtttatgcgatggcaggtttccaaatattacgttactgtatgtttgtacagcgattgaatagagggagcgcccgtggtgaatgttgaacaactgaaaagcagcgtcaatcgcatgtctgccgacgtcgtgcgcgacgcggtgaacgagctgcgcctcgatggcctggtcacggaaggcaagacgccttttaacaaggtgcatttcaatacctgctttgccgagatcgaggcgctgttccagcgcgccggttaccacaagcagctggatgtggtgggttaccagggcttgttgtacgcgttgtacgatccaggccgctgggaagccgtggacgtgttgcgctggctcaaggaattcaccgaggccgcgagtgcctcgccgatcctgcgggcggagttggccaaggcctgaatccgccctaggctcaatcccgcccgatgcgggataatgcccgccggttttcccaggctttgagcatttcatgtcgacttccgtttttatcgcctccgagcgccaagccagcaccctgtatttgccgcccggtccttgggcgacggtgctcgattgcctgtgcgagcacttcccggcgatcggccgcgaacagtggctcgaccgcatcgcccgtggccgggtgctggacatcgacggcagccccatcagcctggacctggcctacaaggaaggcctgtgcatctattacttccgcgaagtgccgaacgagaaagtcatcccggtgcaggaaaccatcctgtacgccgatgagcacctggtggtcgctgacaaaccgcacttcctgcccgtgacccccgccggtgaatacgtcgagcaaaccctgctgcgccgcttgattcgccgcctggacaacccgtcgctggtgcccttgcatcgcatcgaccggcacacggcggggctggtgttgttctcggcccacccggccagccgctcggcatatcagcaattgtttcccacccgccagatcgacaagttctacgaagccatcgctccggccctgccgaacttgacgttccccctggtgcataaaagccgcctggtcgatggcgagccgttctttcgcatgcaggaagggcctggcgcgagtaacaccgaaacggcggtggaagtgcgcgaaaagaacggcgatctatggcgctatggcctgtttcccgtcaccggcaagaagcaccagttgcgtgtgcacatgagtgccctcggcgcgagtatttgtaacgacccgttctaccctgacgtgatcaaggacgcggtagacgactacgccaacccgctgaaactgctggcccagggggtgcggtttatcgacccggttacgggcgaagaacgcagtttccgcagccggatcaccctcgactggtaaccgccagaaacgacaaggcccgcgcgaggcgggccttggattaaccggatagctggggctttctgatactgcgtggtgtcccgttcagggcggcttcgccacccagcgcggggcaagcccgctcactacaggtctttgacggtgcgaacctgatccttattgatgcgggtgcgcttgccgtcaagttgttcgaattcgtagaaacccgaatcttcattgtatttcggggtgtcgacggcctggatttcgcgaccgtcattcagggtgatcactgtcggcgaggcgcaaccggcgagggtggcgaggcccagtgcaagcatgagagcggcgatggtccgttgagtcatgagtttgtctccgagagaattcttttaaatagctgaccttgtgacgcgcagggcatcgacaaagttcctgatgcgaggttcattctgacacgcccgagcgcgtctgtaacagctccggcgtattaaggttggccaggcgcgggtcatccgccgggcactcaaggcccatgccgcccagttgcaggaagagcttgcgcgggctgcgctcaccggcgtgccaggcgcgctccaccgcgtcccgcagggcggaggggaggatgcagatcagcggctcccagaactcaccatggcgcaccattaccggcagcagcgggttgcgccgtgcagtctcacacaggtcagcgagcaaccctgcgtcgatatgcggcacatcgcacggcagtatcagcaggtgcgcgtggcgcgcggcggcgagtcccgcacggatgccggcgagggggccgggaaagtccgggctgtcgtcgttgaccaattggtcggcatacgcggcgtagtgttgcgggttgcggttgcaggagatgatcaagtcatccgtcagcggccgcaccaggcgctgcaaatgggcgatcaggggctggccgtgccattccagcaggcctttgtcctggccgcccatgcgctggccacgcccaccggacagcagcaagaccgaacagggcaggggcgatgaatcgataggcatgacggttccgcagcggcagcaaaaggggggcctgtgatataacatcgggctgttccttcgacaaccggaccgtgccatgaaagccaaggcagatgcgcccttcgtacccctgaacatcgctgtattgactgtcagcgacacccgcaccctcgacactgatacctccggccaggtcttcgtcgaccgcctcaccgctgctggccacaacctggccgagcgcgtgctgctcaaggacgacctctacaagatccgcgcccaggtcgcccactggatcgccgaagacgtggtgcaagtggtgctgatcaccggcggcaccggctttaccggccgtgacagcacccccgaagccgtgagctgcctgctggacaagcaggtcgatggttttggcgaactgttccgccagatctccgtggcggacatcggcacctctaccgtgcagtcccgcgccctggccggcctggccaatggcaccctggtgtgctgcctgccgggttccaccaatgcggtgcgtaccggttgggacggcatcctcgccgagcaactggacaaccgtcaccgcccgtgcaacttcgtcccgcacctgaaacaggccgagccttgtgaatcccgtgggtaagcccggcaagaccggcgccctgatgccggtggaagacgcgttggcgcaactgctgaccatggccgaagccgcaccgatccgtgagcagcaaaccttgcccctggcggactgcgacgggcgggtattggcccaggacctggtctccaccctcgacctgccgccctggccgaacagcgccatggacggctacgccgtgcgtctgtcggactggatcggcgaacctatggtggtcagccagcgcatcttcgcaggccaggcgccacagccgttggctgccggcacctgcgcgcgcattttcaccggagcaccggtgcctgaaggcgccgactgcgtggaaatgcaggaaaacgccgtggtccacgccgatgagcgcctgagcttcaccgagccgctgcacctcgaccagaacatccgcccacagggccaggaaaccacggctggcgagttggttttgtcggccggcacgcgcctgggcccgatcgaactcgggcttgccgcctccctggggcgcgactgcctggaggtggtgcgccgcccacgtgtggcggtgctgtccaccggtgatgaactgatcgagccgggtttgccactggggccgggccagatctacaacagcaatcggcgcgtgctgtgctcgtggcttgcgcgcctgggttgtgaagtgatcgatgccggcatcctgcccgacgacctggagcaaacccgcacacgcctgggcgacctgggcagcgtcgacctgatcctgtcgaccggcggtgtgtcggtgggcgaggcggatttccttggcatcgccctgcgtgaagagggcgagttggccctgtggaaactggcgatcaaaccgggcaagccgctgaccttcgggcacttccgtggcgtgccggtgatcggcttgccaggcaacccggcgtcgacgctggtgacgttcgcactattggcgcgcccttatctgctgcgccgccaaggtgtgcaagaggtggagccactgcgtttcgaggtgccggtgggattcacctggccaaaaccgggtaaccgccgtgaatacctgcgtgggcgcatcgagcagggcaaggcgatcatctaccgcaaccagagctccggcgtgctgcgcagtgcggcgtgggcggaggggtttgtggaggtgttggaaggcacgacgctggcgatcggcgatcgggtcaacttcatcccgctcagtgaagtcctgaactgacccaatccaaatgtgggagggggcttgcccccgatggcggtgtatcagtcaacttaagtgtgactgacactctgaagtgcgccccaaaagttggacacccatccaactcctggggctttttcatgagcaagtacacgacgcaattcaagctttccgccattactgcctttcttgagcgaggtcgcggctttcgtcgcatcgccgctcaatttcaaatggaccccaccctgcttcgccgttgggtggaggcttaccggttgcacggcgagaccagtctgagcagtactggtggacgctacagtgctttgtttaagttctccgtcctacagcgcatgtggcgtgactccctttccctgcgccgcgcagcagcgcttttcaatctgggtgactctacccaagtgggaagatggcagcagcagtattacagtggcggcattgaagccctggccccagggaaaaaaggacggaccaccgcgatgcccaagccacctgcgaaacctcgtaaacctgccggcacactcaccaaagaggaacttgcacataaagccctgcttgatgagcttcaatacttgcgcatggagaacgcctacctaaaaaagcttggggagttaggcgaggcagtgatgaggcgagagaaagaagcgaagaaaaagctcgaatagtcaccgaactgaggcaagactttcccttgagtgacttgctcaaactgctgggccttgcgcgaagtacgtactactaccaactcaaaatcatggacactgcagaccgattttcctcggtaaaagcctctatccagagccttcaggaagagcatgaagggcgcttgggttaccgtcgtatgactttagaactacgtaaagaaaggccgccgatcaacggcaaaacggtacggcgactgatgggagtgctgggtctgaaatgcacagtacgaccgaagaaatacagagcgtataaagggccgatgggagaggtctcgccaaataaattggctcgccagttcgaggctgaacacccgaatcaaaaatgggtgacggatatcaccgagttcaaagtagctggaaaaaagctgtatctgtctccaattttagacttgtacaacggagagatcgtggcttatcagacagccatgcgccctcaatacgctttggttggcgacatgctggaccaagcgtttaagcgcttgcccgagggagcaaagccaatgctgcactcggatcaaggctggcattatcgatactcaaagtaccgggaacgactggaaagagagggcgtggaacagagcatgtcacgccgaggaaactgctatgacaatgccacaatggagagtttctttggcacgttgaagtcagagttttattatcgggaacgcttcgatagcgtggcccagttgcaagccggactcgataaatacatccattactacaatcataaacgaatcaaaaccaagcttggcggactgagccctgtagagtacagagcccggtccgctaaggcctagacaataactgtccagcttttggggcgcacttcactctgctatcgggggcaagccccctcccacatatgattcttcatatgcctcagtaatcgtcgccgcgctcggtgatgtcgcgctccaccggccccgcattcgggtcataccccaccgggaacttgcccttcagcgtccacgcaaacgcaatgatctcggcaatcgtgcggtacagctcctcgggaatactgtcgcccagttccatccgcgccagcagcttgaccagctcggcgttttcgtagatcggtacttcgtgttcccgcgccagcttgaggatcgcttcggccagggcgtcgtcgcccttggccgtcagggtgggggcctgctggccgtcgtacttgagggcaatcgcctggcgcggcggtatcgggttcttcatgcggtttcatccacccagcgttgttccagcccggtttttggcccgcgcggcggggtgccgaggtggcaatcgaggtcgccgacgttgatgcccgaggtcaccaggcgttcgcgcaggttgcccaagtggctttcgatcaggctggcggtgaagggccgcgaggcccacagctggctggacagtttgccctggctcagttgcgcctggacctgcaatggccccagcggctccatgtcgaaggccagctcgacgcgccagagcatctgcttggcgtccttcttgtccttgcgttcgggctggtccttgtccggcgccggttcctcgcgctggaacttgacctgcaacggcactatgtcttgcaaggtgcgcatggggatttccagctgccaggtggtttgcaagcggccgtcggcggtggtgccggtctgttccaggctcgacagctgatggctttgcagccgtgaaattgcgccggcggccaggcgcagcaggttttccaggtcgccttcaccttccagtttcgccatcagccgttcgggcagcgggaagccggcgggtagttgccgggcgctgacctggccaagtgtgttcagtgggctgcgcacgaagttgggcagcacctgggccagggtgttggcggcgaggatcgcggtcatgctggtgctggcgggcagggcgggcagcaagtccgcgaccaggcgcagcaacgcgcctttcatgtccagcggcgggatttgcgggttctgcccggcgagcagcttggcttcaagaaaggcgccgctgttctggatgacttgcgccagtaccttggggttgctgacttgcgccaggtccggcaaagcagccaacaggcgctcggcggcggagcgcagatcggcggaggtgctgtcgccgcgaggcaggttctgcagggcggtgaagacagcatccaacgagccctggcgactttgctgggtcgacagttgctggctgaccgccagttgatccttgagcccgctcaacggcacaaagctcagggtctgcgcgttttgcaccacggcgctgagcaggctgccgacgcgcaggggctgagggctttccacggtcagggtcgcgcccgccagggcgttgttgagcacagtgaccagcgagcggtagatcgccggctgcgcggtgccctggggcagcatctgggtagtcagcaccttggcctgcaacagcgtgcccaccggtatctggttggtgtcaatgcgggtgagggcggcgacattggcgctcaaggcctgctgcaggctgagggtcaggttacccgcaggcgtctggctcaccgccacattgctgcccagcggcagcggctgcgggctgctggcctgcaccagggtctggcggccgccttccagggtcaacttgagcagcaactggaaggcctcgccgccttgtttcagggcgatgacttcggcgtttgcggttttcccggggtcgatcaggccgatctgcggctccagcagtttcagcaactcaccggctgcgggcgcagggccaggcccggctgcaggggcgggtgcaagcgtaggaaggttgatctcaccggtcatcgcgcgcgtcgtctctggggaaattgccctctttagagtagggcatcacatgtataatgccgcccgtctgcaaagagagcggtaaaaacctcacaactatttgatccagctctctaaaatcggtcgccaaagccgttattgtgcatttctctttaacggccgctgcaccgccgacttgaaccgtaaaggcccgcgatcttttgaccagccctcttcttgaagccgtagcgcttgcctgtgaacgcgacctgcgcctgctgttcgagcacctcgaactgcggctgacgggcggcgacatggtgcagatcagcggccccaacggcagcggcaagaccagtttgctgcgcctgttggccgggctgatgcagccgaccgccggtgaagttcgacttaacggcaagcccctcaacgaacaacgcagcgaacttgcccgcaacctggtgtggatcggccacgccgccggtatcaaagacgtgctcaccgctgaagaaaacctcagctggctcagcgccctgcatcatcccgcttcccgcgaggccatctggcaggccctggccgctgtcggcctcaagggtttcgaagacgttccctgccacaccttgtccgctggccaacagcgccgcgtggccctggcgcgtttgtatctgccggggccgccgctgtggatcctcgacgaacccttcaccgcccttgataaacaaggcgtcgcccagttggaagagcacctggcccaacattgcgagcagggcggtctggtggttctcaccactcatcacaccctcaatcgcgtgcccgccggttatcgtgacttggacctgggccggtggtcggcatgagcgtcttcgccctgttggtcgcccgcgaagcgcggctgctctgccgtcgtccggccgaactggccaacccgctggtgttctttgcgattgtcattgcgctgttcccgttggcggttggccccgagactaaactgttgcaaaccttgtccccgggactggtgtgggtggccgcgcttttatcggtcctgctctcgctggacgggctgtttcgcagtgatttcgaagacggctccctcgaacagtgggtcctttcgccgcaccccctgccacttctggtactggccaaggtactggcacactgggctttttccggcctcgcgctagtcttgctctcgccgctgctggcaatgatgctcgggttgcccaccgaatgcctgccgatcctgctgctgagcctgttgctcggtacgccggtgctcagcctgttgggcgcagtaggcgcggcgttgaccgtgggtttgaagcggggcggcctgttgctggccctgttgattctgcctttgtacatcccggtattgatcctgggcagcggtgccttgcaagccgcgctcatgggcatgccggcgaccggttacctgttgtggctgggtagcctgaccgccctggcggtcaccctgacaccctttgctatagcggccggcctgaagatcagcgtcggcgaataatgaggtctgactaagtgttatgtcttagtcagtaaagaccctaagcttttcgcaacgacgaaaagcaaccgtgatggaaacagcaatgaactggacctggtttcacaagctcggctcgcccaaatggttctatggcatcagcggcaagctgttgccgtggttgagcgtcgccgccgtgttgctgatcggcatcggcctggtctggggcctggccttcgcgccgccggactaccagcaaggcaacagctttcgcatcatttatatccacgtacccgccgccatgctggcccagtcctgctacgtgatgctggcggtgtgcggcgttgtcggcctggtgtggaagatgaagctcgccgacgtggccctgcaatgcgccgcgcccatcggcgcctggatgaccgccgtggcgctggtcaccggcgcgatctggggcaagcccacctggggctcgtggtgggtgtgggatgcgcgactaacgtccatgttgatcctgctgttcctgtacttcggtctgattgccctgggcaacgcgatcagcaatcgtgacagcgccgccaaggcctgcgcggtgctggcgattgtcggcgtgatcaacatcccgatcatcaaatactcggtggagtggtggaacaccctgcaccagggcgccaccttcaccctcaccgaaaagccggcgatgcccgtggagatgtgggcgccgctgctgctgatggtgctggggttctactgtttcttcggcgccgtgctgctgctgcgcatgcgcctcgaagtgctcaagcgtgaagcccgcaccagttgggtcaaggccgaagtgcaaagcagcctgggagcgcgtggatgagttttgcttctttcagcgagtttctcgccatgggccatcacggcctgtacgtctggaccgcctatggcatctgcctggcggtgctggccctcaacgtcgccgcgccgatcctggcccgcaagcgttacctgcaacaagaggcgcgtcgtctgcgccgggagaccgaaaagtgaatccgctgcgtagaaagcgtctgttgatcatccttgccatcctggtgggcgtcggtattgccgtgggcctggccttgagcgccttgcaacagaacatcaacctgttctacaccccgacccagatcgccaacggcgaagcgccggtggacacgcggattcgcgccggcgggatggtggagaagggctcgctgaagcgctctgctgactccctcgacgtgaccttcgtggtcaccgacttcaacaaagccgtgaccatcacctaccgcggcatcctcccggacctgttccgcgaaggccagggcatcgtcgccctgggcaaactcaacgccgacggcgtggtagtggccgatgaagtgctggccaagcacgatgaaaaatacatgccgccggaggtcaccaaggccctgaaagacagcggccaatccgcgccaacgcctgccaaggagggctaagccatgacgtccgcactgtttattccggagctgggccagctggcgatgatcctcgccctgtgctttgccatcgtgcaggccgtggtgccgttgctcggtgcctggcgtggtgaccgtttgtggatgagcctggcgcagccggcggcctggggccagtttgctttcctgctgttcgccttcggctgcctgacctacgcgttcatgaccgacgacttttccgtcgcttatgtggccaataactccaatggcgccttgccctggtacttcaagttcagcgccgtgtggggtgcccacgagggttcgctgctgttgtgggcgttgattctcggcggctggacctttgccgtgtcggtgttctcgcgccaattgccgcaagtgatgctggcgcgggtgctggcggtgatgggcatgatcagcatcggcttcctgctgttcctgatcatgacctccaacccgttcagccgcatcctgccgcagattccggcggacgggcatgacctcaacccgttgctgcaagacatcggcctgatcgtgcacccgccgatgctctacatgggctacgtgggtttctcggtggccttcgcctttgccatcgccgccttgcttggcgggcgtcttgatgcggcctgggcgcgttggtcgcggccgtggaccatcgtcgcctgggcgttcctcggtattggtatcacgctgggctcgtggtgggcctattacgaactcggctggggcggctggtggttctgggacccggtggaaaacgcctccttcatgccctggctggtcggcactgcgctgattcactcgctggctgtcaccgagaagcgtggcgtgttcaagagctggaccgtgctgctggccatcgcggcattctccctcagcctgctcggcaccttcctcgtgcgttcgggtgtgctgacgtcggtgcatgcgtttgcgtccgacccggagcgcggcgtattcatcctgatcttcctgctgttcgtggtcggtggctccctgaccctgttcgccctgcgcgccccggtggtcaagagccaggtcggctttaacctgtggtcgcgggaaaccctgctgctgggcaataacctggtgctggtggtggccgcgtcgatgatcctgctcggcaccttgtatccgctggtgctggatgcgttgagcggcgccaagctgtccgtgggcccgccgtacttcaacgcgttgtttatcccattgatgggcctgttgatggtggtgatggcggtcggcgtgctggtgcgctggaaagacaccccagtcaaatggctggccggcatgctgatgccggtgctgctgggcagtgtggccctggcggtgatcgccgggtttgcctacggcgacttcaactgggcggtgctcgccactttcctgctcgccgcctgggtgttgctggccggcgtgcgcgatatcttcgacaaaacccgccacaaaggcctgatcaaaggcctgccgaccctgacccgcagctactggggcatgcaaatcgcccatatcggcatcgccgtgtgcgccctcggtgtggtgctgtccagccagaacagtgccgaacgcgacctgcgcctggcgccgggtgagtccatggacctggccggttaccacttcatcttcgaaggcgccaagcacttcgaagggccgaacttcacgtcagacaaaggcaccgttcgtgtcgtgcgcaacggcaaggaaatcgccgtgctgcatccggaaaaacgcctgtacaccgtgcagagttcgatgatgaccgaagccgggatcgatgccggtttcactcgtgatctttacgtcgcactgggtgaaccgctgggcgacggggcgtgggccgtgcgggtgcatgtgaagccgtttgtgcgctggatctggttcggcggcttgctcaccggctttggtggtttgctggccgcgctggaccggcgttatcgggtcaaggtcaagagccgggtgcgtgaagccctcggcctgcaaggagcggcggcatgaagcgttggttgatggtagtaccgctggcgatgttcctggtggtggcggtgtttctgtatcgcgggctgtacctggacccggccgagttgccttcggcgatgatcggcaaaccgtttccggcattcagcctgccgaccgtgcagggcgacaagaccctgacccaggccgacctgctcggcaaaccggcgctggtcaacgtgtggggcacctggtgcatctcctgccgcgttgaacacccggtgctcaacaagctggccgagaagggcgtggtgatctatggcatcaactacaaggacgacaacgcagccgcgttgaaatggctggcggaattccacaacccgtaccagctggatatccgcgatgaagacggcaacctcggtttgaacctgggcgtgtacggcgccccggaaaccttcttcatcgatgccaagggcgtaatccgcgacaagtacgtcggcgtgatcgacgaagtggtctggcgcgagcagctcgccgccaagtaccaggccctggtcgatgaggccaagccatgaagcgtctgttagccgctgccgttttagcgttgggcctggcaagcgtggcccacgccgccatcgacacctacgaatttgccaacgacgccgagcgcgagcgtttccgcgacctgaccaaggaactgcgctgccccaagtgccagaaccaggatatcgccgactccaacgcaccgatcgccgccgacctgcgcaaggaaatcttccgcatgctgggggagggcaaggacaaccagcagatcatcgacttcatggtcgaccgctacggagatttcgtgcgctacaaaccggcgctcaccggcaagaccgcgctgctctggttcggccctgccggactgttgctggccggcgttgtcgtaatggccgtgatcgtgcgccgccgccgcgccgcgccaaccgatggttccgacgcgctgtcccctgatgagcgtaaacgcctcgaccaattgctggacaccaagactgatgattgatttctggctcgcagccggcctgctgcttctgattgccctgagtttcctgttgatccctgtcctgcgcgaccgccgtgcccagcgtgaagaggaccgcaccgcgctgaacgtggcgctgtaccaggaacgcgttgccgaactgcaagtgcagcaggacgaaggcgtactgaatcccgcgcaactcgacaccggccgcgccgaagctgcgcgcgaattgctggccgacaccgaaggcgtggaaaaaccccgcgaatcgcgcctgggcaagccgctgccgttgttggcggcgtttctagtgccggtcctcggcgttgccctgtacctgcattacggggccagcgacaaggtcgaactgacccgtgagttctcccagccgccggtgtccatggaagacatgacccgtcgcctggaacgcgccgccgctgcccagccggactctgcggagggcctgtatttcctcggtcgcgcttacatggcccaagaccgttctgccgatgccgccaaggtctttgaacgcaccgtggccctggccggccgccagccggaattgcttggccagtgggcccaggcgcagtacttcgccgacaacaaaaagtggtcgcccaaggtccaggcgctgaccgacgaagcgttgaagctcgacccgaaggaagtgaccagcctgggcctgctgggtatcgccgcctttgaaggtcagcgctatcaagaggcgatcgactactggaatcgattgctggcccaactgccaccggacgacaactcccgtgcggcgttgcaaggtggcatagatcgcgctgctgagaagctgaaagaaagcggcggtaccgtcgcccctcaaaaagccgcgatgaaggttcgggtagatctgagcgccgacgtgaaggccaaagccctgcccactgacagcgtgttcatctttgcccgtgcggtctccggcccaccggcgccattggcggccaaacgcgtcacggttgccgaactgccgatcaccgttgaactgggcgatgccgacgcaatgatgccgcagttgaaactgtccaacttccccgaagtccaactggttgcgcgcatatcccgggccggtcagccgaccactggcgagtggatcggccgcagccaccccttggccagcagcaccactgccttgcagcagctgaccattgacagtccggaccagtaatttcgaggaaacgcttatgaccgcactcgcccgaatcaccttgctcagccttgtattgggcctgagcgcatgtgcggtccaccgcccacctcctgcacccaccgggccgaccatcccgccgtccccgtcgacccagccgagcaccaaaccgtcgggcccggtgaccccgccgccgaagccggtgccgaccaaatcgccgacgttcgcgccgcccccaggtgccgccagccattgggacggcaagatgcaggtgtatgtgctggacgaccagcccgacaccttctaccgccagcgtacgtattaccgctggagcaacggctggagccgctcgatcagcccgaacgggccatgggaagacaccgacgtgcacggtgtgccgccggggttgagcaagcagtacgcgcaatgaaaaaaggcgacctattacaggtcgccttttttgcgctttaaaatccgctctctcaaccaccggagatcaaaggtgggagggggcttgcccccgatggcaatggggcattcagcccatcactgactgatccactgccatcaggccaccggacactcccgattcagcgcttcatccaccaacaactgcgcaatctcgatcatctgcaccaccgccaacacctgcttgcggcccgagccatccaagtgctcggcacagtcgtaggcacacacagtcgccgattccagcatctcgctggcattgctcaaggccgcttcggtgctgaggccggggcggacggtgaagatgaggtggggtggggtttgtggtgtgtcatccgaggtggatggcgggggatttggagtaacttttttcatgcagtaaatctccattcagttggagctcaccccatccgcgaccaagcagaagggtggcgagctgtacgcaggttggtcgaccagggaatggaaacccggcagggcctaggccctcccacgcacagctcgccataacgcgagcacaataatgccgcttgcgcggccctgtgcgccattctaatccaggcgaccaagcctgatcgctgatgagcagcgattgcgagaggctaatggtgcgttatagcaaccgcaaccgacagagaaggtaggaaaaatcgcatatgttgtggtgagcagggctgttgtggcgagcaggcttgccctgcgttgggctgcgaagcggccccaaaacctggcgacgggttctgtctgaaataacgcggtggtttcatcagggctgctgcgcagcccaacgcggggcaagcccgctcgccacagggttgatctgagtttcggtcaagtccaacctttcacaaaaccttcatccaaccgcccccctccagtcatgtgcaagtcatagggctgacacctcccgcgcctactgtcgtttgaactcaaccgcagccatcccaggctgttcaaacaagacagagaagcccatgaatcacgctatccatgtcgatcacttgaacaagacctttgcgaagaaatccgccttggtcgacctcgaactcaccattgccccgggtgagatggtcgcgctgattggcgcctccggttccggtaagtccaccttgttgcgccacctggcgggcctggcctgttgcgacaaaagcaacggcggcagcgtcaaggtgttgggccgggaagtgcaggccagtgggcgcttgaacggcaaggtgcggcggttgcgcgcggacatcggctatatcttccagcagttcaacctggtcaatcgcctgagtgtgctcgacaacgtgctgctcggttgcctgggccgcatgccgcgctggcgtggcagcctcggcttgttcaatgccgaagaaaaagcgtttgccctggagtcgctggctcgcgtcggcctggccgatctggcggcgcaacgggcctcgaccttgtccggcggccagcagcagcgcgtagcgattgcccgtgcattgacccagcgcgccgaggtaatcctcgccgacgaacccatcgcctccctcgacccggagtcggcgcgcaaggtcatggagatcctcgccgacatcaaccgccgcgacggcaagaccgtggtggtgaccctgcatcaagtcgattacgccatgcgttattgcccgcgtgccgtggccctcaaaggcgggcgcattcatttcgacgggcagggcagtgcgatgagcagccagttcctcaacgatttgtacggtgccgacgtcgacaccagcctgatgttttccgaccagacccgccacgccaccgccacccctcggctggccttggcgcgcgcttgaaaccttactcacgacccacaggaagcctttccatgttgaaccgtatcggccatgtgtttctgtctgccgtattgctggccagtgtcgcgctgggcaacgcccacgccgctgacaaggtgatcaacttcggcatcatgtccaccgagtcttcgcagaacctcaagagcatctggcagccattcctggatgacatgcacaagaagaccggcctgaccatcaacgccaccttcgcctccgactacgccggcctgatccagggcatgcgcttcaacaaggtcgacgtggcctggctcggcaacaaggccgcgatggaagcggtggaccgttccaacggcgagatcttcgcccagaccgccgccgccaacggtgccgccggttactggagcgtgttgatcgtgcgcaaagacagcccgatcaacaacgtcgacgacatgctcaagaacgccaagaacctgaccttcggcaacggtgacccgaactccacctcgggctacctggtgccgggctactacgtgttcgccaagaacaacgtggatgccgccaccgcgttcaaacgcacgctcaactccagccatgaagtcaacgcgttgagtgtggccaaggggcaactggacgtcgccaccttcaataccgagagctgggagcgcctggaagtcacccaaccggacaaggccgccatgctcaaggtgatctggaaatcgccgctgatccccgccgacccgatggtgtggagcaaggcgctgagcgacagcgagaaggccaagattcgcgacttcttcgcccactacggcgacaccgatgaagagaaggcggtgctgaagaatatgcagttgggcaagttcctgccgtccagcgatgaccagctgttgccgatccgccagttggagctgttcaagcagcgcaccaccgtcagtgccgacgacaagctggaggctgccgacaaggccaagaagctggcggatatcgacgccgacctggccaagctgcaacagcgcatctccgagctcgacaagaaaaccgcagccaacggttaacccctgtgggagggggcaagccccctcccacatttcgctcgaggacaaccatgactactttgcacgctgaagccgtcggcaaacgcacctggccgcaatacctcggctggggcctgttcctggtcctgctggcctgggcctggcacggcgcggaaatgaacccgctggcgctgtaccgcgactccggaaacatggcgaccttcgccgccgacttcttcccgccggacttccacgaatggcgcagttacctcaaggagatgatcgtcaccgtgcagatcgccctgtggggcacggtattggccatcgtctgctcggtgccgctgggcatcttgtgcgccgacaacatcaccccgtggtgggtgcaccaaccgctgcgtcgggtgatggatgcgttccgttcgatcaacgaaatggtgttcgccatgttgttcgtggttgccgtcggcctcggccccttcgccggcgtactggcgctgtggatcagcaccaccggtgtactcgccaagctgttcgccgaagccgtcgaagccatcgacccaggtccggtagagggcgtgcgggccactggtgccagtgccctgcaggaagtgatctacggcgtgatcccccaggtcatgccgctgtgggtcagctacgcgctgtaccgcttcgaagccaacgtgcgttcggcgacggtggtgggcatggtcggcgcgggcgggatcggcgtgatcctgtgggaaaacatccgtgccttccagttcgtccagacctgcgcggtgctgctggtgatcatcgtggtggtgagcctgatcgacgtgctgtcccaacgcctgcgcaagcagttcatctgacctcggaggagtgcccgcgcggcgctttttttaagcatgcagttgtctagacaagatgagccggtgtaccgcgaactcgcggatatcctgcgccgtgaattgagcagctacagcgccggtgatttcctgcccggtgaggtgcacatggccgagcgcttcggcgtcaaccgccacaccctgcgtcgcgccatcgatgagctggtgttcgaaggcagcctgttgcgtcgccagggcaagggcacccaggtgctcgaccggccgctgatctacccgatgggcgccgagacctcctacagtcaatccctgtcagcccagggcgtcggtgtgcaggcggtgttgctcaagcgccgctactgctacgccagccgtgaagaagcgctgcacctggggatcgccgaaatggcgccgatgatcgagctgcaaaccctgcgcaagctcgaccagcagcccgtcagcctgatccgccatcgctactgtgccagccgtgcgccgttgctggccgactacaccggcggttcgctgcgccagtacctgcgcgaacgcgacctgccattgactcgcacccacagccttatcggtgcgcgcctgcccaaccgtgacgaagccgcgctgctgatgatgcctcggcacttgccggccctcaccgtattcaccctttcccgcgatcgcgacggccacccggtggagctggcgcagtccaccagccgttcggatcgcttccagtaccaagtggtgacttgatggagaccctgatgaacctgtccccgcgtcagcattggattggtgtgctcgcccgcgcccaactcagtgaattgcaaccccacgaagcggccttgaaagacgcggagtaccagctcattcgcgccccggaaatcggcatgaccctggtacgcggtcgcatgggcggcaatggcgcaccgttcaacgtcggtgaaatgagcgtgacccgctgcgtagtgcgcctggccgatggccgcaccggctacagctacctggccgggcgcgacaaggtgcatgccgagctggccgccctggccgatgcccatttgcaaggcgcgcagccgagtatctggctcagcgatctgatcactgccctggcgaacgcccaggtcaggcgtcgcgctgaaaaagaggcggacaccgccgccaccaaggtcgagttcttcaccctcgtgcgaggagaaaactgatgaatgcgcaactgttgcaaccggcgtttgtcgacccggtattggacgcccagcgtggttttcgcgccgcgctcaaggccctggccgaaccggggttgatccagcacctgccatccgccccacacctcgagggcctggcgccggcgacgtacgcgttgtgcctggcactgctggacgtggacacgccgctgtggctttcaccgagcttcgacacgccgctgatccgcgccaacctggcgttccactgcggttgcccgctgacttcgcatcgcgaagcagcggtgttcgccttgctcggtgaacacgacctgctggatctgagcggcttcgaccacggcaacgaccgctaccccgaccagtcctgcaccttgctcgtgcagctcaccgacctggagtccggtcgcggcctgctctggcgcggcccaggcatcaagacccagcgccaggtgcacgtcccggtgccgcaggccttctggcaggaacgccaacggcgcaaaacctttccccgtggcctggacgtgctgtttgccgccggccatcacctgatcggcctgcctcgcagcagccgcattgcacaggagcatgcctgatgtacgtagccgtcaaaggtggcgaacaggccatcgacaatgcccaccgcctgctggcgaaaaaacgccggggcgataccgcgattccggaactgagcgtgacgcaaatccgcgagcaactgcccctggccgtggcgcgggtgatgaccgaaggctcactgttcgacgaagaactcgccgcgctggcgatcaagcaagcggcgggggacctggtggaagcgatcttcctgttgcgcgcctaccgcaccacgctgccgcgcttcagcccgagcctgccgatcgataccgcccggatgtcgttgagccggcgactgtcggccaccttcaaggacctgcccggcggccaactgctcggcccgaccttcgactacacccaccgcctgctggattttgccctgctggccgaaggtgagtacccggggccgcagaccgcgccggaggcgacgctggaagactgcccacgcgtgctcggcctgctcgccaaagaaggcctgatcaagaccgaaaccgacgacaacgcccgcgttgccgacatcacccgcgacccgctggaatacccggccagccgcgccgagcgcctgcaagccctggcccgtggcgacgaaggtttcctgctggcgctggggtactcgacccaacgtggctacggtcgcaaccacccgtttgccggtgagattcgtatcggcgatgtggaggtgtggatcgaaccggaagaactgggtttccccatctgcctgggcagcatcgaagtgaccgagtgcgagatggtcaaccagtttgtcggttcggctaccgagctggcgcagttcacgcggggttacggcctggccttcgggcatgccgagcgcaaggccatgggcatggccctggtggaccgctcgctgcgcgccgaggagtacaacgaagagatcgtctcgcccgcccagcgcgaagagtttgtgctggcccactgcgacaacgtcgaggcggcgggctttgtctcccacctcaaactgccgcactacgtggactttcagtccgagctggaactgatccgcaaactgcgccaaccggccgagggcccgagccatgaatgacgccgcgtacaacttcgcctacctcgacgaacagaccaagcgcatgatccgtcgcgccttgctcaaggcggtggcgatccctggctaccaggtgccgttcggtggccgcgagatgccgctgccttacggctggggcaccggcggcatgcaattgaccgccgcgatcctgggggacgatgacgtgctcaaggtcatcgaccagggcgccgacgacaccaccaacgcggtgtcgatccgccgcttttttgcgcgcactgcaggcgtggtcactaccgaagcgacccctgaagcgacggtgatccagacccgtcaccgcatcccggaaacgcccttgcaggcgaaccagatcatggtgttccaggtgccgatctcagagccgctgcgttttatcgaaccctcggaaaccgagactcgcaccatgcacgccctgaatgattacggggtgatgcatgtgaagctgtatgaggacatcgccaccttcggccacatcgccacggcctacgcctacccggtgacggtggatgaacgctacgtgatggacccgtcgccgatccccaaattcgacaaccccaaactcgacatgagcccggcgctgatgctgttcggcgccggtcgcgagaagcgcctgtatgcggtgccgccatacacccaggtcaccagcctcgactttgaggaccacccgttcgaagtgcagaaatgggcgcacagctgcgcgatctgcggcagccatgaatcgttccttgatgagctgattctggatgacgccggaacccagagttttgtgtgttccgacacgtggtattgcgcccagcgggtgaaggagaacaaccagtgagccagccgttattgcaagtgcgtgacctgtccctgttgtacggcccggagaagggttgccagggtgtgagcttcgatctgtaccccggcgaagtgcttgggattgtcggtgagtccggttcgggtaaatccaccttgctttcgttgttgagcgggcgcctgccgccgcacgcgggcagcatcggctaccgcagccaggacggcgaatggctcgacctctacagtgccagcgaagccgagcgccgcaccttgctgcgcaccgaatggggctttgtcgagcagaacccgcgtgacggcctgcgcatgggcgtgtcggccggcgccaacattggtgaacgcttgatggcccagggcgtgcgcaattacgcgcaactgcgtggcgccggtctggactggctggagcaggtggagattgacccacaacgcatcgacgacctgccacgcaccttttccggcggcatgcagcagcgcctgcaaattgcccgcaacctggtttccagcccacggctggtgttcatggacgaacccaccggcggcctcgacgtgtcggtgcaagcgcgtctgctcgacctgctgcgcggcctggtgcgtgaactggatttggcggtggtgatcgtcacccacgacctggccgtggcacgcctgttggccgaccgcctgatggtgatgcgtcgctctcgtgtagtggaaaccgggcttaccgaccagatcctcgacgatccacagcacccttactctcaactgctggtgtcttcggtattgcagccatgacaaatgccttgatcgaggtccgtgacctctcgaaaaccttcaccctgcaccagcaaaacggtgtagtactcaatgtgctgcgcggggtggagttcagtgtgcagggcggcgaatgcctggtgctgcacggtcagtccggcgcgggcaaaagcaccttgctgcgtacgctgtacggtaactatctaccggccggtggcagcattcgtgtacgccatgccggcgagtggctggagctggtgggcgccgcgccccgcgagattctgcaggtgcgccagcagaccctgggctacgtcagccaattcctgcgggtgattccgcgtgtggcgtgcctggatgtggtgatggagccggcgttggcccgaggctggtcgaaagccgaggcacaacagcgcgccgaacacctgctgacccgtctgaacatcccccagcgcctgtggccactggcgcccggtactttttccggtggcgagcaacagcgcgtcaacatcgcccgcggtttcatggtggcctggccggtgatgctgctggacgaacccaccgcctccctggacgaccacaaccgccaggtggtgctggaactgatgaacgaagccaaggctgccggcgctgcattgatcggcatcttccacgaccgtgccgcccgtgaagcggtggccgatcgccatttcgacatgacccccacgcctgttgcccaagaggaatacgcccatgcccgctgaacagatcctcagtaatgcccaggtcgtcacggctgatcgcatgttcctgggctcggtggtgttgcgtgatggcaagatcgtcgacctcgccgaaggccgcagccagttgccccaggcccaggacctgggcggtgatttcctgctgccgggcctggtggagttgcacaccgacaacctggaaaaacacatgaccccgcgccccggcgtggactggccgtcgacctcggcagtgctcagccacgatgcgcagattatcgcggcgggcatcaccaccgtcttcgatgcggtgtccatcggcgacgtgaaccccaagggcaaccgcatgaaaaaactgccggcgatgcttgatgccattgcccaggcagaaggtgctggcctgacccgcgccgagcaccacctgcacctgcgctgcgagctgtgccacccggacaccctcagtgtgttccgcgacctggtggaaaacccgctggtgcaactggtgtcggtgatggaccattcgccgggccagcgccagtttgtgcttgaagccaagtaccgtgagtactacatgggcaagtaccacctgaacgacgaaaccatggacgccttcatcgtgctgcaaaaggccaactccctggcctacagcgaccgctaccgtgcggctatcgtcgagcattgcctggcgcgtggtttgtcggtggccagtcacgacgacgcgacgctcgcgcatgtgcaggagtcggcacgctatggcatgaccatcgctgaattccccacgacgctcgaggcggcgaagggctgccaggcgttgaacatgaaagtgttgatgggcgcgccgaacgtggtgcgcggcgggtcgcactcgggtaatgtggccgccgccggcctggcggccgagggcttgctggatatactttccagtgactactacccggccagcctgttgcaggcggccttcgtgctggctgaccagcaagacggcggcgacctgtcgcgggcggtcaagatgatcagcctggcgcccgcgcaggcggcagggctgaaggaccgtggcgagattgccctcggcctgcgcgccgacctggtccaggcccgcaaccgcgaagggctgcctgtggtgcaacaagtatggcgacaagcgaagagggtgttttgatggcaggcaggttgatctatctcatcgggccgtccggctcgggcaaggacagcctgctggatgccgcacgcccacgcttggccgagcgcggttgccgcattgtgcgccgtgttatcacccgctcggcggaagcggtgggcgaagcggcgcagggcgtcagccccgagcaatttgcgacgatgcaggccgagggcgcgtttgccctcagttggcaggccaatggtttgttctatggcattcccagggagatcgacgattggctggcggcgggggacgacgtactggtcaatggctcccgtgcgcacctggcgcagactcgcaagcgttatccgacctcgctggtgttgctgctgacggtggaccaggcggtgttgcgccaacgcctgatcgcacgggggcgtgaagcgttggcggatatcgaggcgcgcctggcgcgcaatgcgcggttcaccgccgagctgatcgccggcaacggtgcggggttgttcgtactggataactccgggccgctggaacatacggtcgagcgcctgctgtgctgcatcgatcacgggcactcggcatgcgcctgaccttgctcggcaccggtgacgcgcggcaagtcccggtgtatggctgtgagtgcgccgcgtgcggtctggcgcgcagtgatgccagcctgcgccgtcgcccgtgcagcgcgttgatcgaatgcggcgaccagcgctggttgatcgacagcggtttgcccgaccttaccgaacgcttcccaccgcgcagtttcaacgggatcttgcagacccactatcatgccgatcatgcccagggtctgttgcacctgcgctgggggcaagggctggtgattccggtgcacgggccggtggatgccgaaggtttgtccgatctgtacaaacatccgggcatcctggatttcagccagccattcagcgaatttgaaacccggcagtttggcgaactgagcgtcaccgcgttgccgttgcagcattccaaaccaaccctgggttacctgctggaaggcgaggggcgacgcatcgcctacctcaccgacaccgtcggcctgccgcctgcgaccctggcctggctgcaacgcgaacccctggatgtactggtgctggactgttccatgccgccgcagccgcaggcaccgcgcaatcacaatgacctgacgctggcgttgcagagcatcgagcaaaccggtgcgcagttgggcgtgctgacccatgtcgggcacacattggatgcctggctgctggagcatcgccgcgagttgccacggcaagtcacggtcggctgggatggccgggtcatctgaacgccaaaggttccacagaaccctacttcgtcagtaacccttcaacgtattcgataaatgccttggctttggcacttggcattcgacccgtcggcaataccgcccacaggtccttgggcggcagttcccaatcggtcaacacggctttcacctcacccctggccaattctggtgagaacatccactcggacgtcatcgccaggccatggtgggcgagcacgcctgcgcgcaagccttcggaagaggtaacacgcaagcgtcctcgagcggcgatggcgtgttcgtgcgggccttgtttgaatgaccagagcgggctttccccgaggctgtagatcaccgcctggtggttgaggatatccgccgggctttgcggttcgccgaaacgttcgaagtaggccggtgtaccaaacacccggcttgggctttggccaagccggcgggcagtgaggccggagtcactcaggttgccgatgcgcagggcgacgtcgatgccgtcttcaaccaggttgaggaggcggtcgtcgagcaacacgtcgatgttcaggccagggtgttggtccaggaacggtcccaggttaggaatgatccgcatacgggagaacgtcacgccggcgctgacccgcaggttgcccgtcaagccagcgcctgcgccacgggcggcctcgtcagcttcatcggcttcgaaaatggcgctcttggctttctcgaaaaatgccaggcctgcctcggtgggggtcaggcccctggtcgagcgcagcagcaatcgcacggccaggcgggcttccaattgcgcgatgcttttggaaacggcgggttggccgatgcccaggcgtttggcagcggcggagaaggagccggtctcgacgacgtgaacgaaggtttccatggcagtgagacggtccatcgggcgttcctgttagctgggcggcgctcaagcctaaggcgctggactagcggtgtcatgcgtttcccgtgttgcgccggtgagttttcaatattcggtaaaacagccgtcagtcaggcatgcgcattttgtgcttgagtaaagataactctagggttacttttattcaggccaagccaaggaggcgagggtgcaaagcaggctattgatcaaggaactgcaagaggcgggttgggtattggatcgggtcacgggcagccatcacatttttacccatcgttacagcccgtacacgattcccgtgcctcatcctaaaaaagacttgccgttgggcactgtcagaagcatcaggaaacgcgccgggctatttgatttttaaggagagcattcatgcaatacccaatctgtatcgaatggggcgatgacttcaccgccaccggtatccagatccccgatattccaggcgcagtcaccgccggggacagctttgaagaggcctacaacgccgccgtggaagtcgcgcacatcatgctgcaagagatcgccgcagagggcggggccattccgatgccaacgtcggtcgcccattatcatgcccatgaggactacgccgggatgggctggggcatgttggagttggacgtcacgccctacctgggtaaaaccgagaaggtcaatgtgaccttgcccggttatgtcatccagcgcatcgaccggtatgtacgggagcataaggtcaaaagccgctcgtcattcctcgcggacgcggcgttggaaaaattggtgcggtcctagggcgatcaggcggtgtcaggtgtcggtcgcgtacgttgtcggatgagcacggttttttttgcgcatctttttccgggcatgtttgagtcagtttccttatgtttgaaattaagattttgattgaaataagggagtgtttgacaagtttttttcctctagaaatcaacttagtagtgttgttgatatgtcaggagagttgggccgatcagtgattgagtgtgttttctttgcaggtgtgtttattaagtgtttttgaaaagaaccagcactggcgaacgtgtcattgatttgagaattttagcgtcctgccaatggactggtcagcgttagtatttttcatccatggacgaatggctcttcactgttcagagtattcatcgtcatgcactttcctgtcaggcaaccttcacagcaaccccctgcgcttgcgccgaattcccttttgtcagcgtttgataacgacgccttgcactggggaaacaataagaagtcgttcagtaccgcgcaggcggctaaacatatcactcgaggtaacttcaagtttcatgatcgggacggggataataaggtcgtggtgggcttcagtttttccggcgtctttacctcggcccagaaagagcgcgccaggcaggcattgaaagcctatgccgatgtcgccaacatttcctttgtcgaaaacagcgctcatacggatggcggcatagtcatcaggggcgtgccgggttcctggtcaggctgggcggcctctcccagtcagtaccagccgaacgtaacggcgaatgtggggacgggaggcgcaggcgccaaccctgaaatgggcagtcatttcttgtctttgttggtccatgagttggggcacaccttgggcctggaacatccgggcggttacgacggcggtgggacttacgaggccaatgccgattatgcgcaggacaccaaggcccgcagtgtcatgagctattggtcggaacgcaaacaaccggggcatgacttcaacgaacagcaacccgctgcccccatgatggacgatatcgccgcgctccagcgcttgtacggagcgaatacgcgcacccgtgccaccgacaccgtctatgggttcaactccaacaccgagcgtgagcactacagcctcaggagcgcccgcgacaagcccgtgttcagcgtctgggatggcggtggcgaggacaccctggatttctccggctttaccgataaacaaaacatcaacctcaatgccgaggcgttttcggatgtgggcgggctgcgggggaatgtgtcgatcgccaagggggtgagcgtggagaacgccattggcggttccaacagcgatgtgttgacgggtaacggcgccaataaccgcttgaaaggggctggcggcagcgacacgttgcgcggcggtgccggcgccgacacattcgtgtacgcccgcgtcagcgactcaacaccccaggctcccgattttattcaggacttcaccagcggtagcgacaaaatcgatgtggctggcgtgctgcgcgaggccgggctcacgtcgctgaacttcatggatagcttcagcgggcgtgccggcgacgcggtgctcagtcatgacaccacaaccgggcgctccacactggccgtggataccacgggcaacggcacggctgacctgctgatcagcagccatggtcaaatcaaacaggaggatgtgatctggagtggtaatggggagcccgcagccgtgacgcccgatcagacggctgatctcacgctggagccggacccggatcctgcgcctgactcaacgtcacagccggatccgagtacgacgcctgggcctgcgtcttggtttggtgagcgggtgggcaaacagatagcttcaggtatctcgcttttcgcgaactggatatccgggtggttcaggtgagttcaaggtttatccaataagcccaccgaatcctcacgggaaacactcagaaagcgcagcaatgccaccaacgggaatgcactacccaccagcatcacacccagccagccgccgtgttcatacacgctgctggcaatcgccgagccgaatgcgccgccgatgaagatgctggtcatgtacagcgcgttcaggcggctgcggctgttggcgtcgagggcgtagatcgcgcgctggccgagcaccatgttcatctgcacgcagaagtccaggaccacgccggtcacggccaggccgatcacgctgtacagcgggtgcacgaaggccggcaggaagctcaacgcggcgaacaacatggccagcagcgaagcgcgatgggtgtgaccggcatcggccaggcgaccggcgatgggtgcggcaatggcacccagcgcaccgaccagggcgaacagggcgatctcgctttggctcaggccgtggttgcgcgccagttccagtggggcagcggtccagaacaggctgaaggtggcgaacatgcagccctggtagaacgcccgttgacgcagcaccggttgctgacgcagcaaggtgccgagggagcgcagcagttggccatagctggcagagtgatccggctgacgcttgggaatggtcagaatcaacaccacactgataaacgccatcagcgccgccgccgccatgaacatcgcacgccagccgaagtggtccgcgaccacgctggacaccggccgcgccagcaggatgccgagcagcaggccacccatgatgctgccgaccacacggccccgtgattcggcgggcgccaagtgcgcggccaacggaatcaggatctgcaccgacaccgaactgaagccgatcagcagcgacaccagcaggaacaggttcggctgctcggtgaccgctgcgcccagcaggctggcgatagcgatgacggtggtggcgatcatcagtttgcggttttccagcaagtcgcccaggggcaccaggaaaaacagccccagggcgtagccgatttgcgtcagcgagacgatcaggctggccatggccggcgtgaggccgatgtccggcgcgatcagctcgatgatgggttgcgcgtagtagatgttggcaacgatggcgccgcagcaaaacgcaaacagcatcaccatgctccgggtcatggtgcttgtagcgtgggaagtagcgttcatggtgttctcataaaagcgaaggaagtggggcgagcctaaagacaacaccgtagcccgggtaggccgctggcagtgataacactcatgcccggtaatgatgagtgaatcgttaactttctgcgcgaacgctgatgatacattcaggcaccactgccgaaacaggaaatccattgcaatgaagatcacgttgaacaagatgctcctggcttccacgctcgccgccgccatggccgtgggcctggcccaggctgccgagacgcctcgcgtgggcgtacgcggcgccattacggcgatggacggggacgcgatgcatgtcaaggtcaacagcggcgaagaagttgtcgtgcacttgacccaagacacccaggtgcgcgcggtcaccctggccaaaatcgatgaaatcaagccgggcagctacatcggctcggccgccatgcccaacgacgacggcagcctgacggcgctggaggtgcacgtgttccccccggcgatggccggcacgggcgatgggcatcgtgcgtttgatttgaaagaaggcagcagcatgaccaacggcaccgtcggcgacctggtggtgagcaacgggcgcacgctgacggtgaaatacaaaggtggcgagcagaagatcgtggtgccggaagatgtgccgatcgtgaacctggagccgggtgaccgcagcttactcaagccgggggtgaaggtggtgctgtttgccgcgcagggggcggatgggacgatcactgcccaagcgatctccgccggcaaggatggcgtgacaccgccgatgtaacggccaaatacagagccaaatgtgggagggggcttgcccccgatagcagtgtgtcagccagcggataaaccggctgatacaccgccatcgggggcaagccccctcccacatttatcaattactggccgctgtagatctggtcgaacaccccaccatcgttgaagtgggtcttctgcacggtgcgccagtcaccaaaggtcttctctaccgacaggaagtcgactttcgggaagcggtcggtgtacttggccaatactgccggatcacgtgggcgcaggtagttgttggcggcgatttcctggccttgcggtgaccacaggtacttcaggtagtcttcggcggccacgcgggtgcctttcttctcgaccactttgtcgaccaccgacaccggcggctcggcttcggcggaaacgctcgggtagatcacttcgaactgatcacggccgaattcacgggcgatcatctcggcttcgttctcgaaggtcaccagcacgtcgccgatctggttggtcatgaaggtggtggtggcggcacggccaccggtgtccagtaccggggcttgtttgaacagcttgccaacaaaggccttggccttgttttcatcaccgccgttcttcagcacatagccccaggccgacaggtaggtgtagcggccgttacccgaggttttcgggttgggcacgatcacctgcacgccatctttcaacaggtccggccagtctttcagggctttcgggttgcctttgcgcacgatgaaaacggtggccgaggtgaacggcgcgctgttgttcggcaggcgggtgacccagttgtccggcaccagtttgccgttgtccaccagggcgttgatgtcggtggccatgttcatggtgatcacgtcggcgggcaggccgtcgatgaccgaacgcgcttgcttgctcgagccaccgaaggacatctgcagggtcagcttgtcgttcgggtgctcggcttcccagtgtttctggaacgcggcgttgtagtccttgtagaagtcgcgcatcacgtcgtaggagacgttgagcagtgtcacgggggcagcctggacggcgcccgccagggcaaggccggcggccagaagggaggcgctaacgagttttttcactgctcattccttgttgttcgagaaggttgctgattgagtgggggcaatttgccagcgactatagctggcgtcgcatagacgcttaaagattaaaacgaactttgcttattccactttcttgaaaagattactgccacagcgtgagcagaatgcagcgttcggctcatgactgtctttcttgcacaccgggcagtcatgctgcaattgctcaccgcgcatggcactggccagttcggcggtgaaaataccggtgggcacggcgatgatcgaataaccggtgatcatcaccagggacgaaatcacctggcccagcggggtcttgggcacgatatcgccaaagcccaccgtcgtcagggtcacgatggcccagtagatgcccttgggaatactggtaaacccgtgctccgggccttcgatcacatacatcaaggtgccgaacaccgtgaccagggtgcatacgctcaccaggaacaccacgatcttctgcttgctgccgcgcagcgccgccatcaggtaattggcttgcttgaggtaggggctgagcttgagcacgcggaaaatccgcagcatacggatgatgcggatgatcagcaggtactgtgcatcgctgtagtacagcgcgaggataccgggcacgatggcgagcagatccaccaacccataaaagctgaaggcgtagcgcaagggtttgggcgaacagtacagacgcagcccgtactcaatcaggaagataagggtgaacccccactcgatatacgccagcacgtcagcgtagttctggtggatctggtcgatgctgtcgagcatcacgatcaccaggctggcgaggatgatcagcagcaggatgccgtcaaagcgccgcccggcgaccgtgtcactttgaaaaaccatgacgtagagccgctggcgccagtcgttgttgctgtccataaagcccgcctgaatcgaatatcgagcaagcctagggggattcgaaggggctgtccatgcggggtttctgcagcactcgagtaccggcgcgcaccagccagcaggcgaggatgaacggcgcggtcaacgcgggcaggtgcacagcggcaaagcctggggtgaggaggatcgccagcaggatgccgagcagcggcagccagggttggcgacgcacctggctcaatgccacagccgccaacgccgggttgtagctgtgcaggccgaggagggcactggcgggttcgtccagccacagtgcgagcagcacgccgacactggcgcctatcaacgcccatatggcggcgcggcggttggccagccacaggcccagtgcaatcagcgcacccgccaccggttgatccagcagcatgacctgcgcgagcccggtaaaaggcgcggtgaggatagccaaggtgtcgggttcgctcagggcaaacgtgttctgcggcaccgtgcccagcaacaaccagcccaggccgacaaaaggcacggtgtaagcgggcaagtcattgggctggtcggcgtgtttcaaccattgccgtgtcaacatcgccgccagtccgccgcacgcaaggatcagcggcggcagcaacgccgaccaggcgaagtgctggctgatcaataagcccagcagcacgccgttgtagctgtaaaggccggcctggcgttcggccttgggataaccgcgacgctgggccgtgagcaaccccgccacgccacccagcaatgctccgccgaacaaggccggggcgccgatcaggattgccagcagacacagcaggccgcacagcggctggcgctgcaggaagatctggctgaagccgttgagcagcgcttcggcccagtcggggcaggttgggttgtgcatggtggttagtcagtgggaccgagtcgttcccatcggaggcaagccccctcccacatttgaatctgtgaacccaatcaagtgtgggaggggcggtgcgacgattcgacttgcccccgatgaggcccttacagacgctaaatcaacgtctcgatacgcagcgagttggtcgaccccggctgcccgaacggcactcccgcggtaatcaccaacgtatccccgcgctcagccatgccctgtgcctgggcgatctccagcgccgtggaacacacctcgtctacctggcgcaggcggtcattgaccaccgaatgtacgccccatgccacgctcaagcgccgtgccgtggacaggttcggcgtgaggttgaggatcggcgccaccggccgctccctggccgcgcgcaggctggaactgcccgactcgctgtagttcaccagcaccgctaccggcaggatgctgctgatgcggcggatcgcgcagctgatggcgtccgacaccgtggcgtccgccttgggtcggttgacgtcgagctgggtctggtaatccgggccgttttccacctggcggatgatcttgctcatcatctgcacggcttccagcgggtactcgccggacgcggtttccgccgacagcatcaccgcgtccgcgccttcggccacggcgttggcgacatcggtgacttcggcacgggtcggcgccggcgagaagcgcatcgactccagcatctgcgtggccaccaccaccggtttacccagttggcgacagatgcggatgatgtctttctgaatctgcggcacgctttcggccggcacctctacgcccaggtcgcctctggccaccatgattgcatcgctcagttcagcgatttcccgcaggcgctgcacggccgagggcttctcgatcttggccaacaggaaggccttgtcgccgatcagttcgcgggcttcgcggatgtcttccgggcgctgtacgaacgacagcgccacccagtccacgcccagttccaggccgaagctcaggtcgcgccgatccttggcggtcaacgggctgagttccaacaaggcttgtgggacgttcacgcctttgcggtccgataattcgccgccattgagcacggtggtgtcgatggcgtcagcatgcttggtgatgacccgcaggcgcagcttgccgtcgtccagcagcaggtccatgcccggttccagcgccgcaatgatttccgggtggggcaggttgacccggcgctggtcgcccggcgtcgggtccaggtccaggcgcagggcctggccgcgcaccagttgcaccttgccctcggcaaagcgcccaacgcgcagcttcggcccttgcaggtccatgaggatgcccaacgggtagttcagttggcgctccacctggcggatccactggtagcgctgggcatggtcggcatgatcgccgtggctgaaattgagccggaagatattcaccccggcttccaccagttcgcggatgtcgtcgataccatcggtggccgggcccagggtggcgagaattttgaccttcttgtcaggcgtcatggtgggcagtctcaaggatcaggatggcgcggaagtcgttgacgttggtgcgtgtcggctcggtgacgatcaacccgtcgagggcagcgaaatagccgtagccgttgttgttatccagctcatcgctggccgacaggccgagggcttcggcgcggcggtagctgcacggggtcatgagggcgccggcgttgtcttccgagccgtcgatgccgtcggtgtcaccggccagggcgtacacgccgggcaggcccttgaggctgtcggtgaggctcagcaggaactccgcgttacgcccgccacggccattgccacgcacggtgacggtggtttcgccaccggacaggatcacgcacggcgccgccagcggctggccgtgttgcacgatctgccgggcgatgccggcgtgcaccttggccacgtcccgcgcttcgccttccaggtcgccgaggatcaacgggctgaacccggcctggcggactttgaccgccacggcttcgagcgattgctgcgggcgggcgaccaattggaagtggctgcgcgagagcaccgggtcgccgggcttgacggtttccgaggccgggtccagcaaccaattgcgtactgaggcgggggcgtcgatgtggtagcgcttgaggatcgccatggcctgttgcgaggtgctcgggtcgccgaccgtgggcccggaggcaatcaccgtggcctggtcgcccggcacatcggaaatcgcataggtgtagaccgtcgccggccatgccgctttcgccaggcggccgcccttgatcgccgagaggtgcttgcgcacgcaattcatctcaccgatggtcgcgccggatttgagcagggctttgttgatggcctgtttgtcggccagggtgatgccctctgcgggtagggccagcagggcggagccgccgcccgaaagcaggaaaatcacgcggtcgtcttcgccgaggttgctgatcagtgccagcacccgctgggccacagccaggccggcagcgtcgggcaccgggtgggcggcttcgaccacttcgattttcttgcacggcgcgccgtggccgtagcgggtgaccaccaggccgctgacttcgccttgccagcagttctccacgaccagtgccatggcggcagccgctttgccggcaccgatcacgatcacacggccgctgcggtcggcgggcagaaagggttcaaggacttgccgggggtgtgcggcgtcgatggctgtggcaaacagctcgcgaagcaggtgttgcggatcgaccgacataagcgggctcccggggatttttgttattagaggtgcgtcaatttcaggcttggaatggggtcaaattgtgggagggggcttgcctcctcccacatttgattgcatttcatcaggggttatttatcgcgaatcgagaagttcgccatatgctccaggcccttgatcagcgccgaatggtcccagttgccgccgccaatcgcggtgcaggtgctgaacacttgctgggtgccggcggtgttcggcaggttgatgcccagctccttggccccggccagtgccaggttgaggtccttctggtgcaggttgatgcgaaagcccggatcaaaggtgcccttgatcatacgttcgccatgcacttcgaggatcttcgacgaggcaaaaccgcccatcagcgcttcacgcaccttggccgggtcggcgccgttcttggaggcgaacagcagggcttcggccaccgcctggatattcagcgcgacgatgatctggttggccaccttggcggtctggccgtcgccattgccgcccaccaacgtgatgttcttgcccatggcctggaacagcggcaaggcgcgctcaaaggtctgcggctcgccaccgatcatgatgctcagggtgccggccttggcgccgacttcaccaccggacacgggcgcgtccaggtactgcgcgccggtttcgttgatcttcgcggcaaacgccttggtggcggtgggggagatcgagctcatgtcgatcaccaccttgtttggcgacaggcccgcagccacgccgtctttgcggaacagcacgtcgtcgacctgtggggtgtccggcaccatcacgatgatgaactcggcttcctgcgccacctgctgcgggttcgccagggcgacggcgcctgcgtcgatcagggcttgcggcgccttgccatggtgttcggagaggaacagttggtgacccgctttctgcaggttcgcggccatgggttggcccatgatgccggtgccgatgaatccgattttagccatgaaaaaatcctcttgttattacaccgcaagtccactgtgggagggggcttgcccccgatgacggtgtgtcagataaacagtgctgacagacccaccgcgatcgggggcaagccccctcccacatggagtttgcgtggtgtttgttagatcgcgttgtgggtcttcaaccaacccaaacccgcttcggtggtggtcaagggcttgtattcacagccgacccagcccgtgtagccgatgcggtccaaatgttcgaacaggaagcggtagttgatctcaccggtgcctggctcgttgcgccctgggttgtccgccaactggatgtggttgatctggcccaggtgcgcagccatggtgcgggccaggtcgccttccatgatttgcatgtggtagatgtcgtactgcagaaacaggttgtcactgcccacctgttcgcgaatcgacagggcctgcgccgtgttgttcaggtagaagcctgggatgtcgcgggtattgatcgcttccatcactagcttgatgcccaccgcttgcagcttttcagcggcgtacttgaggttggcgacgaaggttttttccagggtctcgtcatcaacgccttgtggccggatgcccgccaggcagttgatctgggtgttgcccagcacttgggcgtaggcgatggccagcttgaccccggcacggaattcctcgacccggtccgggtggcacgccaggccgcgttcgcctttggcccagtcaccggccggcaggttgaacagcacctgggtcaggccgtgcgcatcgagttgtgccttgatttcagccgagctgaattcgtaagggaacaggtactcgaccccttggaacccggcatcggcggcggctttgaaccgggcaagaaagtcctgttcggtaaacagcatggacaggttggcggcgaaacgcggcatagggttctccttaatcgagcagggaaatggcggtcggcgcatcgttgccgaccagggccagatcttcgaattcattgacggcgttgatctcggtgcccatggaaatattggtcacgcgctccagaataatctcaacgatcaccggcaccttgaattcttcgatcattgcctcggcacggcgcagggccggcgcgatctggcctggctcgaacacacgcagggccttgcaacccaggccttcggcgacggccacgtggtccacgccgtaaccgttgagttccggcgcgttgaggttgtcgaaggacaactgcacgcagtagtccatttcaaacccgcgctgggcctggcggatcaagcccaggtaagagttgttcaccaccacgtggatatacggcagcttgaactgcgcgcccacggccagctcttcgatcatgaactggaagtcgtagtcgccggacagcgccaccaccttgcggctcgggtcggccttgaccacgccgagggcggcggggatggtccaacccaatgggccggcctggccgcagttgatccagtggcgtggtttgtacacgtgcaggaactgcgcaccggcaatctgcgacaggccgatggtgctgacgtagcaggtgtctttgccgaacacctggttcatctcttcataaacacgctgtggcttgaccggcacgttgtcgaagtgggtcttgcggtgcagggtggccttgcgctgctggcagtcgtgcagccaggcactgcgatccttgagtttgccggcagctttccactcgcgggccacttcaatgaacatcgtcagggcggagccggcgtcggaaacgatgcccaggtccggggtgaacacgcggccaatctgcgtcggctcgatgtcgacgtgaatgaatttgcgaccctcggtgtacacctccaccgaaccggtgtgacggttggcccagcggttaccgatgcccagcaccacgtccgacttgagcatcgtcgcgttgccatagcggtgggaggtttgcaggccgaccatgccgaccatctgcgggtgatcgtccgggatggtgccccagcccatcagtgtcgggatgactgggatgccggtcaactcagcgaattccaccagcagctcgctggcgtcggcattgatcacgccgccgccactcaccagcagcgggcgctcggcctggtccagcagggccagggctttttccacctgcacgcgggtggccaaaggcttggccaggggcagcggctggtaggcgtcgatgtcgaattcgatctcggccatctgcacgtcgaacggcaggtcgatcagcaccgggccggggcggccggagcgcatttcatagaaagctttctggaaggcatacggcacttggccgggctccaggacagtggtcgcccacttggtcaccggcttgacgatgctggtgatgtccacggcctggaaatcttccttgtgcatgcgggcgcggggcgcttggccggtgatgcacaggatcgggatcgagtccgccgaggcgctgtacaggccggtgaccatgtcggtgcccgccgggcccgacgtgccgatgcacacgccgatattgccggccttggtgcgggtgtagccctcggccatgtgggaggcgccttcaacgtggcgagcaaggacgtgatcgatgccacccaccttctgcaaggccgaatacagcgggttgatcgcggcgcctgggataccgaaggcggtgtctacgccttcacggcgcatgacgaggacggcggcttcgattgctctcattttgctcatgattttggtgcctcttgcgttttgtaattgtatacaagtggtgtctgtccaaagtgtattcacggcgggctgcgcaggtcaatgcattttataaactggcctttgcgttcgtcggaacggcttttttcgacgtatggagcctttgtgcgaaaatattgtatacaaaaaataaagtcattgtgttctatttgttgggtcgagcatctgatcattcagacctccaccgctttcccaataacaaaagaaggacggcaccatgagcgctttaaccttgaaaattgccacccaactggccagtcaggcccttgctgcagggcgcagtgttgcggcggcgccgctgactatcgcggtactcgacagcggcggtcacttgatcgccctgcaacgggaggacggcgcgagcctgttgcgcccgcagatcgccatcggcaaggcctggggtgcgattgccttgggcaaggggtcgcgcttgttggcgctggacgcacagcaacggccggcgtttatcgccgcattgaacagcctggggcagggcagtgtggtgccggcgccgggtggggtgttgattcggaatcaggaaggcgtggtgctaggggcgatcggcatcagtggggatacgtcggatattgatgagcagtgtgcgattacggcgatcgaaggggtggggttgatggcggatgccggggtgtctgcttgatgcttcgttgactgttcgggcctcatcgggggcaagtcgaatcgtcgcaccgcccctcccacacttgaattgcgaacaccgtcaattgtgggagggggcttgcccccgatgggcacagacaccacggtgtgtcagtccggctcacaacccttgagcaccaaccggatgatggtctgcgctgcggcttcgtaatcggcctcatccagcttggccttcccggtcaccgccgagatctgccagtcaaagtccgcgtaggtctgcgtggccgcccagatgctgaacatcaagtgattggggtcaatcgccgcgatcaggccgcgatccacccaatcctggatgcacgtaatgttgtgcttggcctgggcgttcaactgctcgacctgatcagcgctcaggtgcggggcgccgtgcatgatttcgctggcgaacaccttggaggcgaacggcaggtcacgggaaatgcggattttcgagcggatgtagttactcagtacttccttggggtcgccctgcggattgaatggcgtggacgccgccaggatcggctcgatgatgctttcgagcacctcgcggtagaggttgtccttggacttgaagtagtagtagacgttgggcttgggcagcccggccttggcggcgatgtcgctggttttggtcgcggcgaagcccttgtcggcaaactcctcgctcgccgcccgcaggatcttttctttgttgcgctcgcgaatggtgctcataaacctggagtttccttgccaaggctggcggttgcgcatggtagcaccggccatccgcgagcctcaacaatctgcccgtcggcccttgcgccgcgttatgctcgcgccatctcactcttacggaagcccgattcatggcaggaagcagcttgttggtattgatcgacgatatcgccgcggtactcgatgacgttgccctgatgaccaaaatggcggcgaagaagaccgccggggtgttgggcgatgaccttgcactcaatgcccagcaggtctccggggtgcgtgccgaacgggaaatccccgtggtgtgggcggtggcgaaaggctcgttcgtcaacaaattgatcctggtgcccgcagcactgttgatcagtgcattcgccccgtgggcggtgacacccttattgatgctcggcggtgcctacctgtgtttcgaagggttcgagaagctcgcgcataagtttctccacagcaaggaccaggaccaggctgaacacgcgcagttggccgaggccgtggccgatccggcaaccgacctggtggcctttgaaaaggacaagatcaagggcgccatccgtaccgatttcatcctttccgccgaaatcatcgccatcaccctcggcaccgttgctgacgcgcccctgatgcagcaggtgatcgtgctgtccggcatcgctatcgtcatgacggtgggcgtctacggactggtggccggtatcgttaagctggatgacctgggcctgtggctcacccagaagcccggccaggtggcgcgcagtatcggcggcggcatcctgcgggcagcaccgtacatgatgaagagcctgtcggtgatcggtacggcggcgatgttcctggtcggcggtggaatccttacccatggcgtgccggtggtgcatcactggatcgaaacggtcagccagggcgtgggtggggtggcgtggttggtgccggtgttactgaatgggatggtggggattattgccgggtcggtggtgctggcggtggtcagcatggtcggcaaggggtggaaagcactgaaggcctcatatgggaaataaaaaggccattcaaacgaatggccttttttgcgaacaggttttttgagtgcagtgctgacactgtcaggtagtgttcgcgcagacttccactgactaggctgatagcgttgagtgctgagggatgagcgaacctaggagcttgtcaaattcagaaccgggttcagccatttcacctaccccatgaaatgccttaagggtcatcggggttttggctccgtcgatggttttattaccgtttcgatcatgggatttgacccattgatcggcgtcgcgaagggatgcggccctatcttctggactgcgattcacatcgtcccagtcgcctacgcgtgccttaatcaaattgttaagagtagtgacatgatgttttttagtcaggggatctatgtaactgattttatggtgtaggtgagtgcctagtgaagaaagataaggggtgttttctgctttttcagtggtcatgccgtcgcgctgagtttcggaaatgaggtattcataaaacttttgaagttcagagccaggttcagtcaattcagacactgagtgatataacttacggctcgtatgcgttttggcaccgtcgatctcgtgattaccgttttgatcaaaattcctgactatgtcattggctctcagacgggaaatctgattttcttttgtaccgcgacgctcatcgtcccagtcacctacgagctgcttcaacatttttatgggggtagtaaacgtttcctcattagtcaccgggtcaaagtgcacgatgtgttgattgagggtgcggcctggtgaagaaagataaggggtttcatctggtttctctttcatcacgttctcggaatgattcgaggcctgtgaagaaagtgcatgtgccgcatagaaaggttgctgggcggcgggggttatagggagcgacatgtcatattccttgtgtgatgttgaatgtaacaggtgttgagaatctagtctgtttccacaaggtgagtggtgaatgagaggacgtggttcataaaatatatattttgtttcaattatgagaaatgcgttttgacgggtatgggatctttcgttgcaatcgtaggggtgggagctgatgtagcaataagagtcggggatgtcgggttttgttaaggggttgatgtatgaggtttattgatcgagtgtaaataataatttctggaatatttcagattgttgtgtgaattgcatcaggtacatcatttgatgcgcagtgccgagtgtgtttttgtgatcgagtggttccacagataagtaggttggaggaagggggctagtagtgtgcagggatgatggaaataaaaaggccatccggattgctcgaatggcctttttcttactgagcttcttttactcagctatttgtaactttcgagactcggtatatatataccgcaccttctcatactcaaacggcgagttcatctgcccataccggaagctggtctgataacgtttatccaccgcacgcaacgcccagatttccgggtggttggagctgacttccgacacgttgaggaagttgatctgggtttccgcgccgtagtcgacgatcaggccggtggtgtcgcgcaggttcgacgggccgaagatcggcagcaccaagtacgcgccgccgggcacaccgtagaagcccagggtctggccgaagtcttcgctctggcgcggcaggcccatggcggtggccgggtcccacaggccggcgatgccgatggtggtgttgagcagcaggcgcccggtggtttccagggagcggtggcccttgagttgcagcaggctgttcagcaggttgggcacgtcgcccaggttgttgaagaagttgctcacaccggtgcggaggaagctgggtgtcacataggtgtagccattgaccaccggcaggaacacccattggtcgaagcggtagttgaagtggtacacgcgacggttccacgactccagcgggtcatacacgttgagtgcggtgagcgacgagcgctcgaactcacgctgatccaggcctgggttgaacttgagcttgctcagcggttccttgaaaccgtcggcgtccacgttgaccggctcatgggccttgctgttgtcggcattggccacgcctgcgcacatcaaggcggcaagcagcagaagatatttagccacggaagaactccagcatggcgtcggcgttgacgcggtaattgaggttgccgcagtggccgcccagcgggtagacggtcaagcgatcgccgaaggttttacgcaggaaaccgaggtcgccagggccgaggatcacgtcgtcggcgttatgcatgacggcaattttcgggctgttgtgcaggtagtccttgagggcgtacaggctgacctggtcgaccagttgcaacaggctgccgccgtcggagcgtgcgcgccacatcggaatcacttgctcggtgaggtagcaatcgaagtcgcattgcagcgcacgcttgaggaacggcgtgaggctggtgccttcggtgatcgggtatttcggtgggatgatcaggccacgacggttgatcaggtccgaagtaaaggcgatgtcggccgctgaaaagcggaacgaggtgccgatcagcatggccatctgttcgttggtcaggtgctgcttggattgctggaagtcgtagagcagggcgtcgttgaggtcgatgtagcccttttgctggaagtagcgggtcagcttgttcagcaccagttcatagaaggtggtggtgttgttgatgcccttgacctcggtctgtaccagcttgtcgaggttggtgatcgaggtgtagaggttgaccggcgggttcagcagcaagactttcttgaagttgaagctgcgacgggtctcgtccagcttggccacgaatgccgcatccaggccgccgaggctgtagccggtgaggtagaagtcggtcaccggcagcgaggcgttctgtgcgcgcacggcctgcatcacgcggtacatgtcttcggcgtcttcctgggtgatccccggggtggcgaagcgtgaggcggcgctgatgaagtcgaagctggtgggcgacgacagttgcaccacgtggtagccggcctggtaatacagcttcttcaagtattcgttgatgctgctgtcgaatcgcgcgccggtgccggcgatcaggaatatcagcggcgcggcacggtcctgcttggcgatgcggtaggtgagtttcttcaccgcccagaagttgtccggcaggctgaactcgcgctcggggcgcatgttcagggtgtagtcggattggttgatctcgtcatcgctcggcaatttgggccgaaggtcgggcggtgtagtggcgatggtcgcttcaaacgggttggccaaagggtagccatagctggcttggtcaatgtcgacggccagtgctgacgcactcaaaaaaaggctgcccagcaaggcagcacagcgcaaggaacggagcatgacttaatccctaggaggaaacgtgcttaatgaagttcgcaggctatgaccaccgcgttgtcaccgaagtgccagcactcggcacgaaaagtcggaaaataacgtcggaatcggggtaatagtagccagacgatacactttgccacgcattggtgaacactaattgtgtgtatgcgccttgctaacggccaccggggcattaagctgggcgccgtttttgcctatcggagtggcccatgtcccgtcgtttaccgctgatttttctgctaattgccctgccgctatggctggctgccagttacggcgcgcgctttggctttatggaagatggccagtgggtcggcatctgcatcgatgaggccagccgctgggaatgccaattgcgttcgaacctgggcctgatgatccacttcaaggtgctcggttgggcagcgttgatcacgtcggtgctggcgttttttgtgccggggcgtgcagggtgggggttggcggtgctgggtatggtgttcgggttgccggcattggcgttgtacaacaccacgtttgcggtgtttgcggtggtgatcgcggggttgcggttggtcaggaaagggcgggcagcctgatagggcctcatcgggggcaagccccctcccacattggtaatgcactgacctgtgggagggggcttgccccgatagcggttttagaccttgcgcacccgcaagcagcgccacaaggctgccgtcatgagcaggctcactaccgcccaaccccaggcctgctggttcaacaacccttcacggtacaactgcggcgcaatacccgcaccgatgatgaaggccagcaacgcaatctcccgacgcggcccggttaccgggcgcaccaggtacaccagggctggcaacaccagcgcggcgctagggaaactgcggtagcgtgggtcaaacaccagtgccagcatcattactgcccctgcaaacccggcaatcgccaccagccagcctgcgcgttgctccagccagttgaaggcgcgtgcgcgccaatcttcccgtgagctgaggctcaaggcggcatgggtcagcaccagcaggttcaacaccaccagcaagcctgcccacacccattcatcgttgaagcgcgcggtgacgcgcgtcagctcggcccaggtgccgatggagcaggctgccacggcacccagcagtggcagggcgatggcggcccgcacactgcgcacgcgaccacccagcaccagagtgcccagcaggatgattccacctacacccagccatagcggccagtacggcacattggtcacgggcccggcgaggatgcccttgtcctggcgatcggcatcgaacaggccccagtaaccgcccacggcgccttcgcttgcgcgcttccatggctggtcaaaggcttcgatcaggttgtagcgccagccattggcttccgccatagccacgaaacctcgcatgaacttggcttcgttgacccggctcggtacggcggtttcgcgctggcggccttcgctgggccagccggtttcaccgatgaggatgtccttgggcgcgaatttgttgccgaaggtctggcgcacatcacctacgtgcttgagtgcctggtcgatgccagaagggtcatcttcccagtacggcagcaggtggatggtcaggaagtccacggccggcgcgatttccgggtgttgcagccagaactcccacacgtccgcgtaggtcaccggctgcttgatccggcttttgacggtctggatcagcgtcaccagctgtttggcggtgacttctttacgcagcagcgcttcgttgccgacgatcaccgaggtcactacatcagggttggcgttggctgcggcgatcaactcttcgatttctttctcggtcgccaccgggtcactactgacccaggcaccggccatcaccttcagtccatgcttgcgtgccatctccggcaaggcttccaggccggtcatggagtaggtgcgaatgcattcgaagcgcgtggccagcagggccaggtcggcatccatgcgttccgggcgcagtgtgaacggctggtcaaacggggattggtctttatcgaacggtgtgtaggaagcacattgcatcttgtgtgtggcactggcgacatcgggcagtaccacgggccggccgaggccataccagtaaccgatcagggccagcaggccgaggagcaaggcgcagaaatagggcagggcagggaagcgggcagtcgcaggcatggtcggcttatctgggggagcaaaggcgcgcatcttacccggatttgggccgtcccagtggggcagcataattttgacatgcaaagttcgggcgggattttggcgtcacgtcctacaaaatgccctgctggctatgtgatgtcgtttcttgcttgtatgaggtcgctgacagagcaggtcgaaggacgcggcaggttgatgatcgaagtgtcagcactccactgatgccgcagacaccggatcgatgcgcgtgacgggggcgcggtgcaccacataacaacaggttgacgtcgctcggcatccgtcgggcgcagcactttcggggaagtacgatgaagatgcgacgactcttgggcgcagctgccactctggtagttgcgatgagctccacactggccagcgccgacagcaaaaccctgagcatcggctatgtggacggctggtccgacagcgttgccaccacacacgtggcggcagaggtgatcaaggccaagctcggttatgacgtgaaactgcaagcggtagccaccgggatcatgtggcagggcgtggccactggcaagctcgacgccatgctgtccgcctggttgccggtgacccacggtgagtactgggccaagaacaaggacaaggtggtcgactacggccccaacttcaaggatgcgaagatcggcctgatcgtgccggagtacgtcaaggccaagtccatcgaagacctcaagaccgacaccaccttcaagaacaagatcgtcggtatcgacgccggctcaggcgtgatgctcaagactgacgaagccatcaagcagtacggcctcgactacaaactgcaagccagctcgggggcggcgatgatcgccgagttgacccgtgccgaagacaaacaggaatccatcgcggtcaccggttgggtgccacactggatgttcgccaagtggaaactgcgtttcctggacgacccaaaagggatttatggtgctgctgaaaccgtcaacagcatcggcagcaagggcctggagaagaaagcgccggaagtcgcggccttcctgaagaaattccagtgggcctccaaggacgaaatcggcgaagtcatgctggctatccaggaaggcgccaagcctgatgcagcggccaaggattgggttgccaagcaccctgagcgtgtagccgagtggaccggtaagtaatacggtaagcaaaacccctgtgggagggggcttgcccccgatgagggcgtgtcagttgaaatatcaatgactgatacaccgccatcggggggcaagtcccctcccgcattagtttcaccctctgcaaatcttcctgcattctcaaaacccctcgctacactcgatctaagactaaggtcgtctggaacctgttccgcagccgcatacagtggatacgttccaataataaaaaagctgtgctgcgaggataaaaacaatgaacgacagcatttacctctcgattcaaaacagcccgcgtttcaaggagctggtgagaaaaagggaaaggttcgcctggattctctcggcgatcatgctagggctttactccgctttcatcctgttgatcgcctacgggccacaagtacttggggccaagctcagccctggttcgtcgattacctggggcattcccttgggcgtcgggctgattgtgtccgccttcatcctgaccggcatctacgtgcgccgggccaatggcgagtttgacgacctgaacaatgcgattctcaaggaggctgcgcaatgatcggtcgtctactggcaatattcggcgcttcactctttgctccggccgtttgggcggcagacgcattgaccggtgaagtgcacaagcaacccctgaacatatcggccatcgtgatgtttatcgcgtttgtcggtgcgaccctgtgcatcacctactgggcttccaagcgcaacaaatcggcagctgactactatgcggccggcggcaagatcaccggtttccagaacggcctcgcaattgccggcgactacatgtcggcggcgtccttcctggggatttccgcactggtctacacctccggttatgacggcctgatctactcgatcgggttcctggtgggctggccgatcattctgttcctgatcgccgagcgcctgcgtaacctgggcaagtacacctttgccgacgtggcgtcctatcgcctgggccagacccagatccgcagcctctcggcctgtggctcgctggtggtggtggcgttctacctgatcgcgcagatggtgggcgcgggcaagctgatccagctgctgttcggcctggattaccacgtagcggtgatcctggtgggtatcctgatgtgcatgtacgtgctgttcggcggcatgctggcgaccacctgggtgcagatcatcaaggcggtgctgttgctgtccggtgcctcgttcatggcgctgatggtaatgaagcacgtcaacttcgactttaacgcgctgttctccgaggcgatcaaggttcaccctaaaggtgaagcgatcatgagccccggcggtctggtgaaagacccgatctcggcattctccctgggcctggcactgatgttcggtaccgccggcctgccgcacatcctgatgcgcttcttcaccgtgagcgacgccaaggaagcgcgcaagagcgtgctgtatgcaactggctttatcggctacttctacatcctgaccttcatcatcggtttcggcgcaatcctgttggtgagcaccaacccggcgttcaaggatgcggctggcgccttgcttggcggtaacaacatggcggcggtgcacctggccaacgcggtgggcggcagtatcttcctgggcttcatctcggcggtggccttcgccaccatcctcgcggtggttgcaggcctgaccctggccggtgcgtcagcggtgtcccatgacctgtacgccagtgtgatcaagaaaggcaaggccaacgacaaggatgagattcgcgtctcgaagatcaccaccatcgcgttgggcgtattggcaatcggcctgggtatcctgttcgaaagccagaacattgcgttcatggtcggcctggcgttctccattgctgccagctgtaacttcccggtgttgctgctttccatgtactggaaaaacctcaccacccgtggcgcgatgatcggcggctggctgggcctggtcagtgcggttggcctgatggtcctgggcccgaccatctgggtctcgatcctgcaccatgaaaaagcaatcttcccttacgaatacccggcgctgttctcgatgatcattgcgttcgtcggcatctggttcttctccatcaccgacaagtcggcggcggcagagaaagagcgtgcgctgtacttcccgcagtttgtgcgttcgcagactggcctgggggcgagtggggcggtgtctcactaaggtcgtagctggatagggaaatgccccggtcgaaaggccggggcatttttttgtctggggttctgcgttatgggtactcgcgtcatcgggggcaagccccctcccacatttgactgtattcacaaatagacatgtttgaaccgcgcccggtgtgggaggggggcttgcccccgattgcggtcgaccagttgtcacaaacaaaaacggcctccactaggggaggccgttttcggtgcaactaagcgatgcttacttgcgatcttccagcttggtgatgtcacgcgactcgtagccggtgtacagctggcgcgggcggccaatcttgtacgggctggagagcatttctttccagtgggagatccagcccacggtccgcgccagggcgaagatcacggtgaacatgctggttggaatgccgatcgccttgaggatgatccccgagtagaagtcgacgttcgggtacagcgagcgttcaatgaagtacgggtcggtcagggcgatctcttccaggcgcatggccagttcgagttgcggatcgttcttgatgcccagttccttcaacacttcgtcgcaggtctgcttcatcacggtggcacgcgggtcgcggttcttgtagacccggtgaccgaagcccatcaacttgaacggatcgttcttgtccttggccttggcgatgaatttgtcgatgttcgagacatcgccgatttcatcgagcatggtcaatacggcttcgttcgcaccgccgtgggcagggccccacagtgcggcgatgccggcggcgatacaggcaaacgggttggcacccgaagagccggccagacgtacggtcgaggtggaggcgttctgctcgtggtcggcatggaggatgaagatccggtccatggccttggcgagtgtcgggctgatcggtttgatctcgcacggcgtgttgaacatcatgtgcaggaagttttccgcgtacgtcaggtcgttgcgcgggtacatcatgggttggcccatggagtacttgtaaaccattgcggccagggtcggcatcttggcaaccaggcggatcgcggagatttcgcgatgctgcgggttattgatgtcgagggagtcgtgatagaaggccgacagggcgccgaccacgccgcacatgacggccatcgggtgggcgtcgcgacggaagccgttgaagaaggtcttcaactgctcgtgaaccatggtgtggttcttcacggtgctgacgaactgggctttctgctcggctgttggcagttcgccatttagcagcaggtagcaggtttccaggtagtccgacttctcggccagttgctcgatcgggtagccgcgatgcagcaaaatgccattatcgccatcgatataggtgatcttcgactcgcaagaggcggtcgacatgaagcctgggtcgaatgtgaaacggcccgtggccgtcaggccccgtacgtcgataacatcgggaccaacggtgccggttaaaatgggcagctcgacgggggctgcgccctcgatgatcaactgcgcttttttgtcagccatgtggcctcctatttatgcttcaaatcatcagacagaccccccacgcagggcccgcaccactatattgatataaatccagatgtcaatttgcctaaagtcttgcgccagaaggctttaaccgtactttttcctcgaaattgcctgccatttacgccttttattctcccagcgcaatccgctattagggtgaggagtgcgcgttgtcattagtaacctaactgtctatactcggccaccgaccgccaagggcttttgggcttgctttcattgggggtcgcactccctgggtggtgcttacctgaccagtgcactccccaacaactttgccctgattgttaggggctcttcagtgtgaaaaaaagccgtgaatagccaacgacctgtaaacctagacctaaggaccatcaaactccccatcaccggcgttacgtcgttcctgcaccgtgtttccggcatcatcctgttcctgggctcgggcatcatgctttatgcattgagcaaatccctgggttccgaggaaggatacgccgaggtgaaggcatgcttgaccagcccgctggccaagttcgtagcatggggcctcctgtcttctcttctgtatcacctggtagccggtgtgcgccacttgatcatggacatgggcatcggtgagacgctggaaggcggccgcctgggctcgaaaatcatcatcgccatttccgtggtgctgatcgttctggcaggagtttggatatggtaaccagcgttacgaatctgtcgcgttcgggcctctatgactggatggcacagcgtgtgtctgcggtcgttctcgcggcttatttcattttcctgatcggatacctcgtcgcaaatccgggcattggctatgagcaatggcacggcctgttttcccacaatgcgatgcgaatcttcagtctgctggcccttgttgccctgggcgcacacgcctgggtaggcatgtggaccatcgcgaccgactacctgacgccgatggcgctgggcaagtccgcgactgcagtacgtttcctcttccaggcagtctgcggcgtcgcgatgttcgcttacttcgtctggggtgtgcagattctttggggtatctgattcatggctaacattccaactatttcattcgacgccatcattattggtggcggcggtgctggcatgcgcgctgcgctgcagctggcccagggcggtcacaagactgccgtgatcaccaaggtgttcccgacccgttcccacaccgtatcggcccagggtggcatcacctgcgccatcgcctccgccgacccgaacgatgactggcgctggcacatgtacgataccgtcaagggttccgactacatcggtgaccaggacgctatcgaatacatgtgtcaggaaggcccggccgcggtgttcgagctggaccacatgggtctgccgttttcccgtaccgagcaaggccgtatctaccagcgtccattcggcggccagtcgaaggattacggtaaaggcgggcaggctgcccgtacctgcgctgcgtccgaccgtaccggtcacgcgctgctgcacaccctttatcagggcaacctgaaagccggtactacgttcctgaacgagtactacgcggttgatctggtcaagaacgcacaaggcgagttcgtcggtgtgatcgcgatctgcatcgaaaccggtgaaaccacctacatccgcgccaaggccaccgtgctggcgaccggcggtgcaggccgtatctacgcgtccaccaccaacgccctgatcaacaccggtgacggcgtcggcatggcactgcgtgcaggtgttccggtacaagacatcgagatgtggcagttccacccgactggtatcgccggcgccggtgtactggtgaccgaaggttgccgtggtgaaggtggttacctgatcaacaagcacggcgagcgtttcatggagcgttatgcgccgaacgcgaaagacctggctggtcgtgacgttgtggctcgttcgatggttaaagagatcatcgccggcaacggctgtggtccgaatggcgaccacgtactgctgaaactcgatcacctgggcgaagaagtactgcacagccgcctgccaggtatctgcgagctgtccaagacgtttgctcacgttgacccggtagttgccccggttccggtcgttccgacttgccactatatgatgggcggcgtgccgaccaacattcatggccaggcgatcacccagaacgctgaaggcgaggatgaaatcatccacggtctgttcgccgtaggcgaagtggcctgcgtatcggttcatggtgccaaccgcctgggcggcaactcgctgctcgacctggtggtcttcggtcgtgctgctggcctgcacctggaaaaagcgctgaccgacggcatcgaatacgatgacgctaccgacgccaacatcgaggctgcactggcccgtctgaacgcgctgaacgagcgcactgatggcgaagacgtggcaaccctgcgtcgcgagctgcaaagctgcatgcagaactacttcggtgtattccgtaccggcgaatacatgcagaagggtattgcccagctggccgatctgcgcaagcgtatcgccaacgtcaagatcaacgataagagccaggcgttcaacaccgctcgtatcgaagcccttgagctgcagaacctgctggaagtggccgaagcgactgcaatcgctgccgaggttcgtaaggaatcccgtggtgctcacgcccgtgaagactttgaagatcgcgacgacgaaaactggttgtgccacaccctgtacttcccgggtgacaagcgcgtgaccaagcgtgccgtgaacttctcgccgaagacggttccgacgtttgaaccgaagattcggacttactaagggtggctgccatgttgaaagtcagtgtttatcgctacaaccctgatcaggacgctgcgccgttcatgcaggaattcaaggtcgataccggtggtaaagacctgatggtgctggatgtactggcactgatcaaggagcaggacgaaggtttctcctatcgtcgctcttgccgtgaaggtgtgtgcggttccgacggcatgaacatcaacggcaaaaacggcctggcgtgcatcacgccgctgtccgccgtggtcaaaggcaacaagctgatcgttcgtcctctgccaggtttgccggttatccgtgacctggtcgtcgatatgagcatcttctacaagcaatacgagaaagttaagccgttcctgcagaacgacacgccggctccggccatcgagcgtctgcagtccccggaagagcgtgagaagctcgacggtctgtacgagtgcatcctgtgcgcttgctgctcgacgtcgtgcccgtccttctggtggaacccggacaagttcctgggtccagccgccctgctgcaagcgtaccgcttcctggcagacagccgtgacaccaagacgtccgagcgtctggcttcgctggatgacccgttcagcgtattccgctgccgcgggatcatgaactgcgtcaacgtatgtcccaaaggcctgaacccgactaaggccattggtcacatccgcaacatgctgctgcagagcggcgtgtaactgacgttgtagtaaaagcaggaccgttgtgcccgtaaatgctacggcgcaggcttcaaccggcgccgtagttttaacttgagcagcgacttacaaagccgcggctcttattttgaagaaatgagacaagcaggggcattcgggttggtacccgaactatcagcgtgatcctaagtggcttgttttggtcgctgcacttggccttttgcaagcaaactcggtgttttcgccggtggtgtccccaaatcgagggtgaccaagcatgcaagaaagcgtgatgcagcgcatgtggaacagcggctatctttcaggtggtaacgctgcctatgtggaagagctttatgagctctacctgcacgaccctaacgctgtgccagaagaatggcgcaccaaatttcagacgttgtcttcagacggcaacgctgccaccgatgtatcgcatgcaacaattcgcgatcagtttgtgctgctggcaaagaaccagcgccgcgcccaaccggtttccgccggtagcgtgagcagtgagcacgagaagaagcaagttgaagtattgcgactgatccaggcctaccggatgcgcggccaccaggcggcccagcttgacccgctggggctctggcagcgtcctgcacctgctgacttgtcgatcaatcattacggcttgaccaatgccgatcttgatacgaccttccgtgccggcgacctgttcatcggcaaagaggaagcgagcctacgcgaaattcacgaagcgttgcagcagacatattgccgcaccattggcgctgagttcacgcacatcaccgattccgagcaacgccactggttccagcatcgcctggaaggtgtgcgtggccgtccggtgctgtccgccgacgtacgcagccacctccttgagcgcgtaaccgctgccgaaggcctggaaaaatacctgggtaccaaatacccgggcaccaagcgtttcggcctggaaggcggcgaaagcctgatcccgatgctcgacgagctgatccagcgttccggttcctacggcaccaaggaaatcgtgatcggcatggcccaccgtggtcgcctgaacgtgttggtcaacaccttcggcaagaacccgcgtgagctgttcgacgagttcgaaggcaagaagaaggtcgagctgggttccggtgacgttaaataccaccagggcttctcgtccaacgtgatgaccaccggcggtgaagttcacctggccatggccttcaacccatcccacctggaaatcgtttctccagtggtcgagggttcggtgcgtgctcgccaggatcgtcgtaacgacaccacgggtgaaaaggtcctgccgatttccatccacggtgacgcggcattcgccggtcaaggcgtggtcctggaaaccttccagatgtcgcagacccgcggcttcaagaccggcggtaccgttcacatcgtcatcaacaaccaggttggcttcaccatcagcaacccgctggatgcgcgctccaccgagtacgccaccgacgttgccaagatgatccaggcaccgatcctccatgtgaatggtgatgatccggaagccgtgctgttcgtgacccaactggctgtcgactaccgcatgcagttcaagcgtgacgtggtgatcgacctggtctgctaccgccgtcgcggtcacaacgaagccgacgaaccaagcggcacccagccgttgatgtaccagcagatcaccaagcagcgcaccacccgtgagctgtatgccgaaagcctgaccaaggccggcgtggttgacgatgcacgtgttcaggcgaagatcgatgaataccgcaacgcgctggacaacggtctgcacgtagtgaaaagcctggtcaaagagccgaacaaagagctgttcgtcgactggcgtccatatctgggtcacacctggaccgcgcgtcacgacacctcgttcgatctgaaaaccctgcaggaactgtccgccaagctgctggaaatcccggaaggcttcgtcgtacagcgccaggttgcgaagatctacgaagaccgtcagaagatgcaagccggcggcctgccgatcaactggggttacgccgaaaccatggcgtacgcgaccctggcgttcgaaggtcacccgatccgcatgaccggccaggacatcggccgtggtacgttctcgcaccgtcatgcggttctgcacaaccagaaagacgctggcacctatgtgccgctcaagcacctgtacgaaggccagccacgcttcgacctgtacgactcgttcctgtccgaagaggccgtactggcgttcgaatacggttactcgaccaccacgccgaacgcgctggtgatctgggaagcccagttcggcgacttcgccaacggtgcccaagtggttatcgaccagttcatcaccagcggcgagcacaagtggggtcgcctgtgcggtctgaccatgctgttgccacacggttatgaaggccagggtcctgagcactcctcggcccgtctggagcgttacctgcaattgtgcgccgagcacaacatccaggtatgcgtgccgacgacccctgcccagatctaccacttgctgcgtcgccaggtgatccgcccgctgcgcaagccgctggtagtgctgacaccgaagtcgctgctgcgtcataaattggccatctcgaccctggaagatctggctgatggttcgttccagaccgttattccagaaatcgacacgctggacgcggccaaggtgactcgcctggtcctgtgcagcggcaaggtctactacgacctgctggaaaaacgtcgtgccgaaggccgcgaagacatcgccatcgtgcgtatcgagcagctttacccgttcccggaagacgacctgatggaggccattgcgccttacaccaacctcaccaacgtggtgtggtgccaggaagaaccgatgaaccagggcgcgtggtacagcagccagcatcacctgcgtcgcagcatcggcaaccacaacaaggccctgggcctggaatatgccggccgtgatgcttccgctgcacctgcgtgtggttatgcgtcgatgcacgccgagcagcaggaaaaactgctgcaagatgctttcactgtttaacgccttcgcgctgactgaaaccgaattttaaggacccacagataatggctatcgaaatcaaagccccgtcattcccggaatcggttgccgatggcaccgttgccacctggcacaagaaaccaggcgacgctgtaaagcgtgacgacctgatcgtcgacatcgaaaccgacaaagtcgtgctggaagtgttggccgaagctgacggcgtgctgggcgcaatcgttgccgaagaaggcgctaccgttctgtcgaaccaggtactgggctcgatcgaagagggcagtgctgctgccgctgcgcctgctgctgcgccggccgccgccgctgctgcgcctgctgccgctccggctggtggcgctgaagacccgatcgctgcaccggctgcccgccagctggctgaagagaacggcatcaacctggcctccatcaaaggcaccggcaaagacggccgtgtgaccaaggaagacgtggttgcggcggttgaagccaagaaaaacgctccggctgccgcacctgccaaggctgctgccccggctgctgctgcgcctgtgttcgccgccggcgaccgcaccgagaagcgcgttccgatgacccgcgtacgtgccaccgtggccaagcgtctggttgaagcccaatcgaacatggcgatgctgaccaccttcaacgaagtcgacatgaccgaagtcatggccctgcgttcgaagtacaaggatctgttcgagaagtcccataacggcgtgcgcctgggcttcatgtccttcttcgtgaaagcggccaccgaagcgctgaaacgcttcccggcagtcaacgcttccatcgacggcaacgacatcgtttaccatggctacgcagacgtcggcgttgccgtgtccagcgaccgtggcctggtggttcctgtactgcgtaacgccgagctgatgagcctggctgaaatcgaaggcggcatcgccactttcggcaagaaagcccgtgacggcaagctgaccatcgacgagatgaccggcggtaccttcaccatcaccaacggtggtaccttcggttcgatgatgtcgaccccgatcgtcaacccgccacaagccgcgatcctgggcatgcacaacatcatccagcgtcctatggccatcaacggccaggtcgtgatccgcccgatgatgtacctggcgctgtcttacgatcaccgcctgatcgatggtaaagaagccgtgactttcctggtgaccatcaagaacctgctggaagacccggctcgtctgttgctggatatctgattgaagcagctgcaagttgcgagctacaagctgtaagaaaaagcagcttggcttgcagcttgcggctaaaagcttgtcgcaaatagaggatctattttcatgacacagaaatttgacgtcgtagtgattggtgcaggtcctggcggctacgtagccgctatcaaggccgcacaactgggcctctcgactgcttgcatcgaaaaatacaccgacaaggaaggcaaactggcactgggcggtacttgcctgaacgtcggttgcattccttccaaggcgctgctggacagctcctggaaattccacgaagcccaggacggcttcgcgatccacggcatcaaccatgctggcgtgaccatggacgtaccggcgatggtcggtcgtaaagccaacatcgttaagggcctgacttccggcgttgccaccttgttcaaggccaacggcgttacttccctgcaaggccacggcaaactgctggccggcaagaaagttgaaatcaccaagccagacggttcgactgagatcatcgaagccgagaacgtgatcctggctccaggttcgcgtccaatcgacattccgcctgctccagtcgacaacaacgttatcgttgattcgaccggggccctggaattccaggctgtgcctaagcgcctgggcgtgatcggcgctggcgtgatcggcctggaactgggttcggtctggtcccgcctgggtgctgaagtgaccgtgctggaagccctggacacgttcctgctggctgccgacacggccgtttccaaggaagcgctgaaaaccctgaccaaacaaggtctggacatcaagctgggcgctcgcgtcaccggctcgaaagtcaacggcgaagaagttgtggtcaactacaccgacaaggatggcgaaaaaaccatcactttcgacaagctgatcgtagccgttggtcgccgtccagtgaccaccgacctgctggcatccgacagcggcgtgagcatcgacgagcgtggtttcatccatgttgacgatcactgcgcaacttccgtgcctggcgtgtacgccatcggcgacgtggttcgcggcatgatgctggcgcacaaggcttccgaagaaggcatcatggttgtcgagcgcatcaagggtcacaaaacccagatgaactacgacctgatcccatcggttatctacacccacccggaaattgcatgggtcggcaagaacgaacagcagttgaaagctgaaggcgttgaagttaacgtcggcaccttcccgtttgccgcttctggccgtgccatggcagccaacgacaccggtggttttgtcaaagtcatcgctgatgccaagactgaccgcgtattgggcgtccacgtgattggcccgagcgctgcagaactggttcagcaaggcgcgatcggtatggaattcggcaccagtgccgaggacctgggcatgatggtcttctcccatccgaccctgtccgaagcgttgcacgaagctgcgttggcagtgaatggcggcgccatccacatcgccaaccgcaagaagcgctaagcgagataataagaaaccacggcggagttgcccgtcgtgagccttgcgcgcaagactcaccgcggaatatccgctggacgcagccttgcgcagctttacgggccttgagccccgcaagttgcgcaagcagcagtcacaggtggcgcggcactcataatgagcgcagcgccgaatgcgcagtacctaacgaagacggtaaaaagcatgaatcttcacgagtatcagggtaagcagctgttcgctgaatacggcctgccagtttccaagggctacgcagtagacaccccggaagcagcagcagaagcttgcgacaaaatcggcggcagcgagtgggttgtcaaagcccaggtccacgccggtggtcgcggtaaagcgggcggcgttaagctggttcgcagcaaagaagacgccaaggccttcgcacagcagtggctgggcaagcgtctggtgacttaccagactgatgccaatggccagccagtcaccaagatcctggttgaatcgtgcactgatatcgctaaagagctgtacctgggcgctgtcgttgaccgttcgagccgtcgcatcgtgttcatggcttccaccgaaggtggcgtggacatcgagaagatcgctcacgaaaccccagaaaaaattctgaaagccactatcgacccactggttggcgctcagccattccagggtcgcgagctggctttccagctgggcctggaaggcaagcaagttgcccagttcgccaagatcttcgtgggtctggccaaactgttccaggatcacgatctggccctgctggaagtgaacccgctggtgatcaaggctgacggcgatctgcactgcctggacgccaagatcaacatcgacgccaacgccatgtaccgtcagcctaagctgaagactttccacgatccttcgcaagacgatccgcgcgaagcgcacgctgccaagttcgaactgaactacgtagccctggaaggcaacatcggctgcatggtcaacggtgccggcctggccatgggtaccatggacatcgtcaacctgcatggcggcaaaccagccaacttcctcgacgtgggcggtggtgctaccaaagaacgcgtaaccgaagcgttcaagatcatcctgtccgactccaacgtcgctgcagtactggtcaacatcttcggcggcatcgttcgttgcgacatgattgccgaaggcatcatcggtgcagtgaaagaagtcggcgttaaaatcccggttgttgttcgccttgaaggtaacaacgctgaactgggcgctaaagtactggcagaaagcggtttgaacatcatcgcggctaccagcctgaccgacgctgctcaacaagttgtcaaagctgcggagggcaaataatgagcgtcctgatcaacaaagacaccaaagttatctgccagggtattaccggttcgcaaggtagtttccacacccagcaagccatcgaatacggcaccaagatggttggcggcgtaactccgggcaaaggcggcaccgagcacttgggcctgccagtgttcaacaccgtgaaagacgctgtagctgccactggcgccaccgccagcgtgatctacgttccagctcctttctgcaaggactccatcctggaagcggcattcggcggcatcaagctgatcgtctgcatcaccgaaggcattcctaccctggacatgctggacgctaaagttaagtgcgacgagctgggcgtagtcctgatcggccctaactgcccaggcgtgatcactccaggcgaatgcaagatcggcatcatgccaggtcacattcacttgccaggtaaagtcggtatcgtttcccgttccggcaccctgacctacgaagcggtcaagcaaactactgacgccggtttcggtcagtcgacttgcgtcggcatcggcggtgacccgatcccaggctccaacttcatcgacatcctgaagctgttccaggaagacccgaagaccgaagcgatcgtgatgatcggtgagatcggcggttcggctgaagaagaagcggctgcctacatcaaggcacacgtgaccaagccggttgtttcctacatcgctggtgtgactgcccctgcgggcaagcgcatgggccatgctggcgcaatcatctctggcggcaaaggcactgcagacgagaaattcgctgcgctgcaagacgcaggcgttaaaaccgtgcgttcgctggcagacatcggcaaggccctggccgagctgaccggttgggctgtcaagtaagctctatgcttagttgacgccgtaccaacacaaaggccaccttcgggtggtctttgtgcgttccggggttaagtaaagatcaaaatgtgggagggggcttgcccccgattgcagtgggtccgtcaataaatacagtgactgacacgccgccatcgggggcaagccccctcccacatttgcctgtattgccaaattaggtatgaaaatgcgacatgcagatgtcgcttatcggacagtccgccccgcaacagtgcgttcgtcagccaatttctgtaccctagccgcctctttatgcgtgcgcatcccaaaaggaagccccgcgctagaccggtcggctcccataagggccggcagcatttccctcatccatagggaatccctctctaaattccgattcagtagtgtggtatttcctcaaatgaaagtgttgaaaagccaggacatcctggcgctgggctttatgacttttgccctgttcgtgggcgccggcaacatcatcttcccgcctatcgttggtttgcagtccgggcctcatgtctggatggcagcgttgggcttcctgatcaccgccgtgggtttgccggtggtcaccgtgatcgccctggccaaggtcggtggtggcatggacgcgttgagcagcccgatcggcaagatcgccggtggcctgctggcggcggcggcgtatctggcggtagggccgctgttcgctaccccgcgtaccgcgaccgtgtccttcgaagtgggcctggcgccgctgaccggcgagagcccgctggcgctgttcctctacagctcggtgtacttcctggtggtgttctttgtctccctgtacccaggtcggctgctggacaccgtgggtcgcttcctggcgccgctgaagatcatcgccctggccatcctcggcatcgccgcgtttgccttgccggccggtgacgtgggcgtcgctaccccggaatatgtggccgcaccgttttcccaaggctttatccagggttacctgaccatggataccctgggcgcgctggtgttcggcatcgtgatcgtcaacgcgattcgctcccgtggcgtcgagtcgccgaagctgatcacccgttacgccatcattgcgggcctgattgccggcgtgggcctggccctggtgtacttcagcctgttccgcctgggttcgggcagccatgccgtggctgccggtgccacaaacggtgctgcggtgctgcacgcctatgtgcaacacacctttggatccctgggcagcggcttcctggccgtgctgatttccctggcgtgcctggtgactgcggtgggcctgacctgtgcctgcgccgagtacttcagcaaaatcctgccgctgtcctacaagaccctggtggtgatcctggcgctgttctcgttgttcgtgtcgaacctgggcctgaccaagctgattgccttctcgatcccggtgctgaccgcgatctacccgccgtgcatcgtgctggtggcgctgagcttctgcaaagacttctggcaggagcagggccgcatcgttggtccggtgatgctggtgtcgttcatctttggctgcatcgatgcgctcaagggcgctggcttggcgggttggatgccttcgcccctggcgaacctgccgttgagcgaccagggcctggcctggctggtgccgtcggtgatgacgctggtcgtggcgttcggggttgatcggatgctcggcaagcgcagcgaagctatcgcataaacccatgtttcccgctgtactgaaatgccccgtatcaatcgatatggggctttttttatgggtgaacggcagtgtctttttctgtgcactaacgtcgaactgacgcaaaagcgtttcagccctctttctgcaaaggacccgcatgtcgttcatcgaaaccaatcagatccacctgcttgccgccctgtggttcgccctttgctggggcggctatacccgatacgccatttggaaggcccgtgacacggcctgcctcgccagcgtgctgcatctgtaccgcgaagactggatgcgccgcatgctgctgcgcgacaaccgcatcgccgacgccagtgtgatcggcaacctcgagcgcaacgcttcgttctttgcctccagcacgctgatcatcctcgccggcattctcacggtgttgggtgcttcagagcgggcagtgtcgttgctggcggacataccgatggtgcaacaggcgtcccaaggtatgtcggagatcaagctgctgtgcctggcactggtgttcgtctatgcgttctttacattcagttggtgcatgcgccagtacaacttcgcggcggtgctggtcggctcggcgccgatgatcggcgagcgggatgtgtcggagcaggagcgcaaggcatttgctctacgtgcggcgcgagtcatctccatggcggccaaccagttcaactttggcctgcgttcttattacttcggcatgaccatgctggcgtggtttgtcagcccctggctattcatgttgatgagcgctggggtagtgttggtgctgtatcggcgggagtttcattccgacgtgctgcaagtgatggtgtttacccagacggatacaccgccgtcggaaccggttaaagaagcggtttgatcaacccctcaagtaaaaaacgccaggcaaagtaaagcccgctatctaagcgggctttctttttgcagcgaagctacttcaaaccgcggtctcaagaaccggtagcaggtgctgcttcttttgcggcggcttggttcgattcagcctgagctttggcagcttcggcgttttctttcgcagcgtcgttcactttatcctgagccttggccatatctttctgagcttgctcagaatgggctgcagcgtcttgggctttgtcttcggatttcttgtcgcaggcagccagaccgagggcagcggccagcatcatggaaatagctaaagtcttgcgcatgggtgtttctccttattgaagatatctactggcctttcgagcatggcggttcggcattagttccttttattcggtagatatataaatcgctgactaacaggaacttttgccctggcgaccattctgcggatcaacactaataagagtctggaacgaatgagcgaaaatcccctgttagagcgtgcgaagcgctttgtatcggccttgcgccactgtcaggtgctgggcattaccgctcatcaggccagcgaggagggcatcacgctgatcatgccgtatgcgccccatctggtcggcgatccccaatcgggggtgattcacggtggcgcgctgacctccctgatggacaccgcctgcggcatggccaccctgtgcgtattgccggaattcgaggtgtgcccgaccctcgacctgcgcgtcgactacatgcatcctgccaccccacacaaaccggtgtacggcttcgcccaatgctaccgggtgaccaccgacgtgatcttcacccgaggcttcgcctaccaggatgacccgcagcaacccatcgcccatgtcgtcggtacattcatgcgcatgggcaaacgcctcaagggcgcacaaggactgggcagcacgatcaagggagagcaggcatgacgcaccgattcaagacccgcctggagcaggcccacgggcgcggcgattacgcagcgctgctcaacctgatcccctatgccaagttgatcggcatcgaatgcacccggctgggagatgagctgctgtttcgcctgccggccaacaaggacaatattggtaacccgatattgccggcgctgcacggcggggtgatcgcgggtttcatggaactgtcggcggcgctgcacctgctggtgttcaccggcgcaccgggcatcccgaaaatcatcgatttctccctggattacctgcgcgccggtcaatttcgcgacacttacgccaaatgccaggtatggcgccagggccggcgagtggcgaacgtggcgatcaccgcctggcagagcacggcggcagagcccatcgccacggcccgcgcgcattttaagatcgaggaaccaggccacccttgaaatcctgctcttagcccccaactttgatgacaacccgccgccaaccctctagggcgcggccactgccatccaattggagtttgatgaccatgagtgtggaaactcaaaaggaaaccctgggcttccagaccgaggtgaagcaactgctgcacctcatgatccattcgctgtattccaacaaggaaatcttccttcgcgaattgatctcgaacgcctctgacgctgtcgacaaattacgtttcgaagccctgtccaagcctgagttgctggaaggtggcgccgaactgaaaattcgtgtgagcttcgacaaggacgccaagaccgtcacgatcgaagacaacggtatcggcatgagccgtgacgatgcgatcgcccacctgggcaccatcgccaagtccggcaccgccgatttcatgaaaaacctctcgggcgaccagaagaaagattcgcacctgatcggtcaattcggcgtgggcttctattcggcctttatcgttgccgaccaggttgaagtgttcagccgccgtgccggcctcgacgccagcgaaggcgtgcactggtcttccaaaggcgagggcgaattcgagatcgccaccgtcgacaaggctgaccgtggcacccgtatcgtgctgcacctgaagtccggtgaagacgaattcgccgatggctggcgcctgcgcaatatcgtcaagaagtactccgaccacatcgccctgccgatcgaactgccgaaagaacaagcggcagccgaaggcgaagacgcgcctgcccaggaatgggaagtggtcaaccgcgccagcgcgctgtggacccgtccgcgtaccgagatcaaggacgaggaataccaggagttctacaagcacatcggtcatgactacgaaaacccactgagctggagccacaacaaggtcgaaggcaagctggaatacagctcgctgctctacgtgcctgcccgtgctccgttcgacctgtaccagcgtgaagcgccaaaaggcctgaaactctacgtacagcgcgtgttcgtgatggaccaggcggaatcgttcctgccgctgtacctgcgcttcatcaagggtgtggtcgactccaacgacctgtcgctgaacgtgtcgcgggaaatcctgcagaaagacccgatcatcgattccatgaagtcggcgctgaccaaacgcgtgctcgacatgctggaaaaactggcgaagaacgagcctgagcaatacaagggcttctggaaaaacttcggccaggtcatgaaagaaggcccggcggaagatttcgccaacaaggaaaaaatcgccggcctgctgcgttttgcctcgacgcatgaagagggtggcgagcaggtggtttctctggccgagtacctggcccgcgccaaggaaggtcaggacaagatctactacctcaccggcgaaacctacgcccaggtcaagaacagcccgcacctggaagtcttccgcaagaaaggcattgaagtgctgctgctgaccgaccgtatcgatgagtggctgatgagctacctcaacgagttcgacggcaaatccttcgtcgacgtggcccgtggtgacctggacctgggtaacctggactccgaagaagagaagaaagaagccgaagaagtcgccaagtccaaagaaggcctggtcgagcggatcaaggcttccctgggcgaggctgtcagcgaagtgcgcgtgtcgcaccgcctgaccgactccccggcgatcctggccattggcgagcaggacctgggcatgcagatgcgccagatcctcgaagccagcgggcagaaggttccggactccaagccgatcttcgagttcaacccggctcacccgctgatcgagaaactcgacggtgagcagagcgaagagcggtttggcgacctgtcgcacatcctcttcgaccaggcggccctggccgccggcgacagcctgaaagacccggccgcctatgtgcgccgcctgaacaagctgttggttgaactgtcggtttgaccctgacgtagaaaaacccgcttcggcgggttttttcgttctaacgcacctcaactggagtaaatgatgagccaagtcactgtacgttccgtggtctatcagattgatggccagtcctacgaaagccgcctggcgttcgatgccagccacaagggcccgttgccggggttgttgatggcgccgaactggatgggggtgagtgcgggtgccgaagagatcgccaaaagtgtggccggccagggctacgtggtactgatcgccgacctgtacgggcagaccgtacgcccgtcgaatggcgatgaagccggtgcggcgatgatgccgctgaagaatgacaacccgaagctgctcaaactcatgcaagcggcgtttgagcaactgcagggccaggccgaggtggatacctcgaagcttgcgaccttcggcttctgctttggcggcttctgctcgctggagctggcacgtaccggtgcaccattgaaggcggccgtctcgttccacggcaccattgacacccagaacccggacggcgccaagcatatcaagggttcagtattggtcctgcacggtgcttccgacccattggtgccgaaggcgcaactgccggcattcgaagatgaaatgaacgcggccggcgtggattggcaattgctgagctatggcggcgcggtgcattccttcactgacccccatgcgaatgtgccgggcaagatgatgtacgacgccaagaccgccaagcgcgcgttccagtcgatgcacaacttgctggatgaggtgttcaagggctgattcttcagcgcctgtccgggcctaatcgggggcaagccccctcccacacttggatgcaatcactgatcaaatgtgggagggggcttgccctcgatggctatctcactggcaactcaatcctttcagactcccccggcaccgtcggccactccccggccgcccacctctgcctggcctgctcgatcaccgcggggtcactcgcgacaaaattccaattgatccgccgtggcccatcaagcggcgcgccgccaaacaccaccaagtggcaatcactgtccgcaaacaatgtcatctcctgcccggccggcaataccactaggctgtggacttcaagcgcctcgccgtccaactgaccgtcaccttccagtacatacacggcccgttcctcatgctcatcaggcaacagtagggttgtagccgtctgcatccgcacctcggcatacaaggtgggcgacagcaccggcaccggtgacttgaggcagaacccgttgcccgcgatcaggcgtatctgcacgcccaggttgtcactcaccggcaggctcgccgccgggtgatggctgtaatgccccggccccgtctcgtggtctttgggtgacgccaaccatacttgcagcccatgcaggctgaacccgctggccttgagcgcctcgggtgtgcgttcgacgtgggcaatcgcgctgccggcggtcatccagctcacatcacccacctgcaccacctggtccgagcccaggctgtccttgtgctgcaatgcgccctcaaacagatacgtgagggtcgacagcccgatatgcgggtgttggcggatattcatgccgtgacccggcgcgtagcgggtcagcagcatatggtcgaaaaacacaaaaggcccgacgctgcggcattcccgcgacggcagcgggcgcaggatcggttggccttcgacgtcttcggggcgagggcggatcacggtgagggtggtcatggtgcgtcccagtctgagcgggttggatgctgctgagcataacccgctccacgggaggttgccgctattggctgaaggcgccttccgacagtttggtgtcgatgctgatctcggcggtggtcatcagcttgtgcaccgggcagcgatctgccacgcggtgcagctcatcgcgctgttcgtcggtgagcacgcccttgagggtgagcttgacgttgagtgtgtatttgcccttttgctcttcggcggcgtcatgggtgacctccacggtcacgccggtgagggggataccttttttctgggcgtagagcttgagggtcagggctttgcacgaggccagggcggcgtcgaagtagtcatggggggagggcgccgaatcgtcgccgccgaggctcttgggcaggtcggtgaacaactcatggttgtcgatgttgaggctgtggcgaaagttgtcctggttcagggtgtttacggtaacaggcatggcaaacctcacagggtggcaggatgaaggtcatgcagttatagagcatgctggcacttcgatgttccgcgttttttgccggatgaaccctggcaaggcgttcaaggtctacccgtatcagcccctatcgaggtgttaccgtgccctggactcgcctgacccttgccctgttgttcgcctccggcagccttgccgcgcaggcccgcgactatgcctacagcgatgcgcacctgcattacgtggatttcttccaggaaactgcaggcatggacaagctgctcaaggccatggccgacaatcgcatcgaacacgtgatgatttccggtattccggtcgcgaagaaatggcacgaggacgaacccaagcgcccgcgctattacgccggtgacgacgccgatgcctattggtacagcgccaccgacgtgatcgtggccgcagcggtcaacaaactgacccctgagcagcgcgagcattttcatccgttcctgtccggcttcaaccccaacgacaagaactcggacgcccatatccagcgcatgctcgatctcaacccaggcctgtggcagggcatcggcgaggtttttacccgtcatgacgacctcacggccatcaccgccggcgacacaccacgggccaataacgaagccatgacccgcatttatcacctggcggcggaaaatgacctgccggtgatgctgcactccaatatcacctccaagcgcgagcgcaacccgctgtacctggctgaagtcgaagagccactgcgcaaccacccacacacccgttttatctgggcccatggcggcaccagcaaggaaatccaccgtcaccaggtgcagatggactttttgctgcccaccttgagccgcatgctggaggcgtaccccaacctgtacatcgacctgtcctggagcatgcttacgccgtatttgctggatgatagaggccatcctcgtccggagtggataacgctggtggagcgtttcccggagcggttcatgctgggctcggacgtcgtcgggcgtttcaacaagctgggtaaggaaatgcgtcgcttcgagcctttcctcgatgcactgcctgaggacgttgcgcacaaagtggcacgcgacaatttcctggccatcctgcctaaagcccatcgcgatggggcgccacgctgatatcgcgttttgatcttacgcaaaccccagattgcgccgatacctttcaatagccagctgcaattggatgcagcgctggtgattgccagcgcatcggagcagtagacgtcgacaggcgcgaaccagagcagtgcggcgagccaggagttgtcgcggttggcggtggacctgaacacgatggtggcgcggttttcggtgtaggggcgggcgccgaggcggcgctatcgggggcaagccccctcccacctttgatttgtgagtgcattcaaaatgtgggagggggcttgcccccgatgaggccctcccagccactaaaaaatccagcccataaaaaagccccgaaccagtcggggctttttaatgcggtcaagctacaggtcttactgaccctgccagcgtttcagcaccagggtggcgttggtgccaccgaagccgaagctgttgctcatcacggtgtcgatttttgcattctcaacggtcttggtcaggatcggcatatcagccacaaccggatcaatctcatcgatgttggcggagccggccatgaagttgccttccatcatcagcaggcagtagatcgcttcgtgaacgccagcggcgcccagggagtgaccggacaggctcttggtagagctgatggccggggccttgtcgccgaataccgcacgcacgccttccatttccttggcatcgccgaccggagtcgaggtgccgtgggtgttcaggtagtcgattggggtgtccacggtggacatggccatctgcatgcaacggatggcgccttcaccgcttggggcaaccatgtcgtagccgtcggaggtcgcgccgtagccgacgatttccgcgtagatcttggcgccacgggccagagcgtgctccagctcctcgaccaccaccatgccgccaccgccggcaatgacgaaaccgtcacgcttggcgtcgtaggcgcgggaggccttttccggggtttcgttgtactgggtggacagtgcacccatggcgtcgaacaggaacgactggctccaatgctcttcttcaccgccgccggcgaacacgatgtcctgcttgcccagctggatctgctccacggcagtcccgatgcagtgagcactggtggcgcatgcggaggagatcgagtagttcacgcccttgatctggaacggcgtggccagacaggccgaaacggtgctgcccatggtccgtgtgacacggtacgggccaacgcgcttcacgcctttttcgcgcaggatgtccagcgcttccatctggttgagggtcgatgcgccgccggagccggcgatcaggccggtgcgtacgttcgatacctggtcttcgctcaggccggagtcggcgatcgcgtctttcatcgccaggtaggcgtaggcggcagcgtggccgacgaagcgatagatcttgcgatcgatcagttcttcgaggggcaggtcgatggagccggaaacctggctacgcagacccatttcggcatattccgggttgaagcggatgccagggcgacttgcacgcaggttagcggtgacggtctctttgtcattgcccaggcaagaaacaatgcccagaccagtgataacgacgcggcgcatgcggataacccttaaaagttgtcagtggaagtgaatacgccgacccgaaggccttcggcagtatagatctcgcgaccgtcgacgctcaccgaaccatcggcgatggccaggttcagcttgcccttgaggacgcgcttgatctgaatgttgtaggtgactttcttggcggtcggcaggacctggccaaagaacttcacttcgcccgaacccagggcgcgaccgcgacccggcaggccttgccagcccaggaagaaaccgaccagctgccacatggcgtcaaggcccaggcagcccggcatcacagggtcgccttcgaaatggcaggcgaagaaccacaggtccggggtgatatccagctcggcgaccaattcacctttgccgtacttgccaccctcttcgctgatatgggtgatgcgatccaccatcagcatgttcggggcgggcagttgcgcgttacctgggccgaacagctcaccgcgactgcagcgcagcaggtcttcccgagtaaaggcgttttgtttggtcatgcgagctcctcaataatcccatgcggcagggtagggcaaatcttcccgaaccgaatgaagcgttcatgcctcatgtcggcagcctacacgtagactattgcgttgtagtgaaagtcacagcggcaaggcactgaatgtacacttgttcactgaaattttaaaccgggcctgtttataggcccgttcgggtgcctaagactgccgcactttcgtctttcacgccagtcggagttggctgatggcgcggcgctattgcacccagcgctgcaggatttgctgcaaatccgtgcgtttgaacggcttggccaggtaatcgttcattccggctgccaggcaggcttcacggtcgccctgcaacgcgttggcagtcagggcgatgatcggcaggtcggcgcagccgggcagttggcggatcttgcgggtggcctcgtagccgtcgatcagcggcagccggcaatccatcaggatcgcggtgaaaatcaggctctcggcactgcggatcgcctcggcaccgtcggtggccaggctcacttcaaagccgaggctgcgcaacatggcttcgaccacggtgcggttgaccgggttgtcctctaccagcaatacatggcggccatcgccggcgttggctttgccgtcggcgccttgcgcgatggccggtacgctctgctggtcgatggccaggggaatttccagggtaaataccgagccgcggccttcttcactttgcgcgcgcagggtgccgcccatgcgttcggccagggtacgggcgatgggcaggcccaggccggtgccgccgtaacgccttgaaatggaactgtcggcttgctggaacgcatcgaacatcaactccaggcgttcggcggaaatcccgatgccgctgtcgcgcacggtgcaggtgaaccacaccagttcatggtcgagggtctgccaatggggttcgacgctgacgctgccctgctcggtgaacttcagcgcgttgccgatcaggttcaccaggatctggcggattcgcgtcggatcgccctgcacgcgcaaagcgtccaaccctggtggaatcgacagtttcaacgccaacccgcgctgctgggcgctgtgctggaacgcctgggcgcagctgttgatcaggtccgccaggttgaacggaatatgctccagctccagggccgcgcgttcgatgcgcgagaagtcgaggatgtcgttgatgaccttgagcaagtgctcggtggattcggaggccagcgccgcgtactcggtctgctcctcggtcatctcggtggtttccagcaattgcaacatgcccagcacgccgttcatgggcgtgcgcagttcatggctcatcatcgccaggaaatccgacttggcgttgttggcgcgctcggcctcttcgcgggtctggatcaactgggccatggcctgctgctgttcgcggctggcctggttgaggccttcggccaggttattgatgtgtcgcgacaggtcgcccaattccgagtcgtccacgatcggcaacggcgtcttgtagtcaccttgctggatggcttttacggcgtggcccatggcgctgatcggctgcgacaggctggcggccaggcgccgcgcgagcaggaaggtaaacagcagggcgaacagcgccaggatgccggccttgaacaggatctcctgctggcgctggctgaatgcgtcgttggacatgccgacgatcacccggcccaggtagtcggcccgcggtgctttgggttcgttgaggttgtcctggaaaaaatcattgcccaactggatgtgttgcaggcgaatcggtgcctggaacactttcaccgacagcgaacggtcgtgtttttccgacggttgctcgacatacaccaggatgttctcgctgctgtcctggatctccaggaaccgcacatggggcgtagcgagcgtggcgcgcagcaggctgtcgagcacttcgttgttgccggagatcaccccgtactcggtggcgggcgccagttggttggcgatcaactggccggtgtggtccagttcctggcgcaagtcctggatccgcacgaaggtgaaaaagctgatcaacagcaacgtcagcaacagcgccgggcccagggtgatgagctgggtgcgggtgttgatgtcccaacgacggcgcaaggtcatgggcgtttttctccttcggccaagcggatcgcgacgccggcttcgtccacctgttcgatccccagtgagcgcgcgacttgcgggttgcccacgactttgaagtgttccgggtacagcgagcgcggccagttggccggcgggtggtcgagcagacggtctagcacggccagccagtcggcctggtcgctgtaggtactggccaggctgccggcccgcacaaagcctgcattcgggcccaccagcggcaattgctgggcatagctgctcagcaacaggttcttcgcggttttcgggttgtacaactgcgggtcatcgaggccgagcagcacgtcactgttcctgaacaggttttgcagcgggcggctgtcattaatgttgtcccagagctgtggcacgatttccaggccgagcggtgtggcgtgttggcgcagttcgggcagcaggaactcactgtcggcgccatacagcacgccgatgcgccgcgcctggggcaggatggcggcgatcaggcgcagttggcgctccagcggtgggtcgctccacagtaggctgatgtgcgggtgaggtgtgctgcccaggcgttgatgggcctgtaaccgactgatacgcagcaccagggtcggcgggccctgggtttcctgcaggcgccagtcgaggccgggcaggtcgagcaggatcaggcgtgtgttggccggcagtcgaccaggggctggcaagtttttgagtggtgtgaaggtgacgcggtcttcggggcgttgctgggccagggcttgggcgaaggcctgcacgccgacgccgtcttcggcggcggtcaacaggatctcggcactccaggccggcgcggcaaacagcaggcacgcgagcagcagaatgcgtcgccagagcgtgtggataaaaaagcaggtcatccgtgacgagtcgcccatgtcagaactctagctccgcgctgaagtagagcacatggcgatggtcataattgttatcggcccaggtggtgggctggtgatcaaggcgttgttgcaacatgccggccagctccacgttggctttgcccagggcaatgcgcttggccacccgcaggtcgacccgttcgaagcgatattggttgagtgcgtcatcgccgtagtagaacaacgcgctggaccagccttggccccattcgcgcaaccaaccggcagagccactgttgcgcgcggtctgtgctttgtcccgcgggttgctgctggtggcatcgacgtaagcataggtcagccgcaggcggtcggcgttgctcacgcgccagtcgaactgggattcggcgccggtgaagcgtgcgctgttggcgttgctggcaatgtactggttattgcgcagcggcgaactgatcatgtcggtgatttcgtcgtagaacagtttcacgtccatgttcagcccgatgtcggcaaagaagccgttgtaccccaattcccgcgacttcatcatctctttatcgaggttgcccggcccccgcgtctttacgaagtattgcccggtggtctgaccgtaggccggggagctgaggttggtgacgcgataactccagttgacgttgttctcgaacatgtccggcgagcggatggcttcggagtacaccgcgcgcaagccatggcgcgggttgatcaggtagttgaccgccacccgtggcgtgagcgagttgccgctcaggtgcgtgtcctcatacatggcgccgccttgcagcagccaatgttcgctggcgcgccattccaactggccgaacaggcgccaggtggtgtcgtccagggtgccgttgaagtaggtgtcggagtcggcgcggtcgtagcggtaattcatgccgctgaccaggcgcaggctgtcggagaggctgagggtatcctggatttccagatcgtagcggctttcgcgggtgctctggtcgatgtctccgcacacgctctggttggcgccgttacgccattggtccagcacctggttggccagcgcttgctcggcggcgctgcccggtggcgcggtgccttggctgtaggtgtccatgtgccgggccagcagttcggcgtagttggggttcatctgccacagttgggtcaattccgggctgaacgacactttggcgtcgcaggccttccagatttggcggcggtcccactgctgggccgagccctggatgtacaggctgtgctcggggttgaaatcaaaattccagcgcagcgagccggcgtagtccttggccgtgacgtcggagttgttgccaccttcggtaatcccggcgaataccgggctgtaggtatacggacgttggttggtgccttccttcgcatccagttgccagtcgatgctctgctgcgcgttcaacgtctggctaactgccaggctgaagcggttgaggcgccgcccgtcgcggcggtcggcgccagcggcgtcgctgtcgaagccatcgtcctgctggccggacagcgacaggcgcaaatcgccggtttcccagccgacgccctggctggcatagaagtcgttgatgccacgttcgccacgcaccaccttgacccgcgtaccgtggctgttggcgggcgagcgcgtgaggatgttgaccaccgccatcaaggcattggcgccgtagctgacggtgttggggccgcggaacacttcgatgcgctcgatatcttccatggccaccggaatgtcgctccagtccacggtggccaggcccgcacggtacaccgagcggccgtcgatcagcacctgcatgcgccgcgcatcgctggcgctggtgccgtggtagttcaccgccgcctggttgccggaggtgtagccgaccatcatccccggcaccaggcgcagcaactcgctgatatcccgcgcgccgctggccttgatcagctcgctgtcgatcacggtcatgctgccgggcacggcggcggccgattgcttgaggcgtgtggcggtcaacacctggggcaatggctggctgtcgaggaacaggtcgtcggccatgacaggcgcactgcacagcagcatcaaccacagagatgaacggggaggagggcccaaatacacggcacggccttgataattacggatagccgcccatgttaactgaggtggggccatttgccagtcgcaggacttgcaattacttcatgtaagtgtggcattttccgacaagcgcacgaattgatacgggggctggccgccggcgggtcggcccgtataatgccgccatcgccactggtatggattaacggattgcatatgactgaacagcgccctatcgcggtcctgggaggcggaagttttggtaccgccgtggctaacctgctggccgagaatggtcacgctgtgcgccagtggatgcgcgatcccgaacaggccgaggccattcgggtgcaccgggaaaatccgcgttacctcaaaggcatcaagattcatccggcggtcgagccggtcactgacctgctggaaaccctcacggcctgcgacctgtgcttcgtcgcgctgccgtccagcgccttgcgctcggtgctggcgccccacgccgaacgcctggcgggcaagctgctggtcagcctgaccaagggcatcgaggcgcagaccttcaagctgatgagcgaaatcctcgaagagatcgccccccaggcgcgtattggcgtgctgtccgggccgaacctggcgcgggaagtggccgagcacgcactgaccgccaccgtagtcgccagtgaagacgaagaactctgcgaacgggtccaggccgtgttgcacggtcgtaccttccgggtctacgccagcagcgaccgctttggcgtcgagctgggcggtgcgctgaaaaacgtctacgcgatcatcgccggcatggccgtggcgctgggcatgggcgagaacaccaaaagcatgttgatcacccgcgccctggccgagatgacccgctttgcggtgaaccagggcgccaacccgatgaccttcctcgggctggcgggcgtgggcgacctgatcgtcacgtgctcctcgccgaaaagtcgcaactatcaagtcgggttcgccctgggccagggcctgagccttgaggatgcagtcacgcgcctgggcgaagtggccgagggcgtcaataccctcaaggtgctcaaggccaaggcccaggaagctggcgtgtacatgccgttggtcgccgggctgcacgcgatcctgtttgaagggcgcaccttgaaccaggtcatcgagttgctgatgcgcgccgagcccaagaccgatgtcgactttatttccaccagtggtttcaactgaggaacgcgtcatgaacgatccgaaagcagcccccaagtacgaatccattgccctgcgcatcctgtggatgctggtgtttgccctggtttggcaagtggcgcagttcctgctcggcgcgctggtggtggtgcaactgatctaccgcctggtctacggcgccccgaacctgggcctgatgaacttcggcgacagcctcagccagttcctggcgcagatcggccgtttcggcagcttccataccgagcaaaagccgtggccgtttgctgactggccgaccccgcttgcgcctgagggcgaagccgcccacagcgtgccgccggcaccgcacccggtgcgtgatgaagagccgaaactgtgaagttgtggatactgcgccacggcgaggccgaagggcatgcgcgcaccgatgccgaacgcaacctcaccgagcacggccgtggcgaagtgttgcgcagtgctgcgcacctgatcggccagcccctcagcgcgatcatcgccagcccttacgtacgggcgcagcagaccgcgcacctggtgcgtgatgcgttgggcttcgagccggagatccgcacggtgccgtggctgacccccgatggcaacccgttgaaggtgctggaaaaactcgacaccgacgacaatgtgctgctggtcagccatcagcctctggtcggcagcctgatcagcttcctgcagcacggccaccagcgccagccgcagccgatgtacaccgctagcctggcggaactagagggggatttcccgctggcggggctgatgagcctggtcagcgtgaagaatccgtaggctttatcgctgctttgtgtgtgctatatagtcaaccaagcaagtgcttggttggctatcgtcggaccacaaaggagcgcgtcccatgcccgtcgcatttcgattgccgttgcaggtgtttttcgaacgtgaagcgcggcacccgcgccagacctttctggtgcagcccattggcggcggcgaggtgcaacgcctcacttggggcgaagccggccatcaggcccgttgcgccgcgcactggctgcgcgcccgagagctgcccccaggctcgcacattgccctgatctcgaaaaactgcgcgcactggatcattgccgacctggcgatctggatggccgggcatgtctcggtgccgctgtatcccaacctcactgccgactccgtggcgcatgtgctcagccattccgaggcggcgctgacgtttatcggcaagctcgacgactggcccgccatggggcccggcgtgccgtccaatgtcccgaccatcagcttgccgctgtgcccaaccggcgcgttcgatttcagttgggccgacctgcagggctgttcgccgatccaggacgacccgctgccggccgctacggacctggccaccattatctatacctccggcaccaccggcctgcccaagggcgtgatgcacagcttcggcgcgctggggtttgccgccacccgtggcaccgagttgttcgggttgggggagggcgaccgcctgttgtcctacctgccgctgtgccatgtggccgagcgcatgtttgtggaaatggcggcgatctacaccgggcagacggtgtttttcgccgaaagcctggagacgtttctgaccgacctgcgcagggcgcggccgaccgcgctgtttggcgtaccgcgtatctggaccaaattccagatgggcgtctacgccaaaatctcggcaaaacgcctcgataccctgctgcgcctgcccttcatcggcaagcgcgtgggccgcaaggtgctcgccggcctgggcctggatgcgttgcgcatcgcgctgtccggggcggcgccggtgcccgaggcgctgctgcgctggtatcaacgcctgggcctggacgtgcttgaggtgtatggcatgaccgagagttgcggttactcccatgtgtgtcgccccggccagcagaccctcggctggatcggcctgccgtgccccggtgttgaggtgcgcatcgatcctgcgggcgaagtgcaagtgcgcagcggtgcgaccatgctcggctactacaaggacccgctgaaaaccgccgagacgatcaccgccgacggcttcctgcgcaccggtgacaagggcgagcaggctgccgacggccggctgcgcctgaccggacgcctcaaggagatcttcaagaccagcaaaggcaagtacgtggccccggcgccgattgagaaccgcctgtccgaacatgcgcgcatcgaacaggtgtgcgtggtgggcgatggcctgaccgcaccgatggggctgtgcgtgttgtcggcaatcagtgaggacccgcatgcgctgcgcagcagccttgaacgctggctggagcaggtcaatcaagcattggacaaacatgaacgcctgcgccagttagtggtggtgaaagacaactgggcggtggaaaacggcttcttgaccccgacgttcaagatcaaacgcaacgtgatcgaatcgacctacggtgaacatttccagacgtggagcgagcgttccgaaaccgttctgtggcaggattagggccatcataaaaccaacaaggacatccgcatgagcctgtggcgcacgcaaccgaacatcgaccaactcaatgcgatccagaaaaacaccattggtgaactgctggatatccgttttgaacgcttcgacgacgaatcgctgaccgccagcatggtggtcgaccatcgtacccaccagccctacggcttgttgcatggcggcgcatcggtggtcctcgccgagagcgtcggctccatggccgcctacctgtgtatcgatgcgagcaagttctattgcgtgggcctggagatcaatgccaaccacctgcgcggcgtgcgcagcgggcgggtgacggcagtggccagggcgatccatatcggccgcaccacccaggtgtgggacattcgcctgaccagcgacgacggcaaggccaattgcgtgtcgcgcctgaccatggcggtggtgccgctgggcgagaacccgccggcgcgataggcgtggcgtgagtgtcatcattcctggcagttacagtcattgctgtggcggtcggggctggtgacaatcaatctctgtttttgtcgatggatccggtatgtcgcagcatgtgtttttcgcccacgccaatggtttcccctcggccacctacggcaagctgtttgccgccctggccccggaatatgcagtggcgcacttgccgcagcacggccacgaccccaggtttccggtggacgataactggcagaacctggtggatgagctgatccaccacttggagcagcagccggaaccggtgtggggcgtggggcattccctcggtggcgtgttgcatctgcacgcggccatgcgttgcccgcagttgtatcgcggggtggtcatgctcgattcgccggtgctgacccgcgccgaccgctgggtgatccgcgcggccaagcgcttcggttttatcgatcgcctgaccccggccggccgtaccctgggccgtcgcgaggagttcagcgacctggaagcggcacgccgttacttcgccggcaagaccctgtttcgtggctttgatcccgaatgcttcgatgcctacctgcaacatggcctgcagcaagtgggcgatcgcctgcgcctgcgcttcgacccggccaccgaaatcagcatctaccggggcgtgcctcacaccagtcccggccaggtgcgccagatgaaggtgccgttggcggtggtgcgcggccgccagagccgggtggtgatgcgtcaccacgccagcggcgtcggtcgcctgcccctgggcgaaatgctcaccatgcccggcggccacatgttccctcttgaacgcccccaggacaccgcgaccttgatcaagagcctgttttcccgctgggaagcccgcgagcgcagttgcgcatgagcacaccggtcgaagaagtgcgcctgagcctgccgcatatcgaattggcggcccatctgttcgggcccgaggacggtttgccggtgatcgcgctgcatggctggctggacaacgccaacagctttgcgcggctggcgccgaaacttcaggggttgcgcatcgttgcactggacatggccgggcatgggcattcggcgcatcgtcctatcggcgccggttacgccttgtgggattacgtgtacgacgtgctgcaagtcgccgaacagctgggatggaaacgttttgcattacttggccactccctcggcgccatcgtttccctggtattggccggtgcgctgccggagcgcgtgacgcacctcggattgatcgacggggtgatcccgccgaccgccagcggtgaccacgccgccgagcggctgggcatggcgttgcaggcgcaattgaacctgcaggacaagcgcaagccggtctacaacaccctggatcgagcggttgaggcgcgcatgaaaggtgtggtggcggtcagtcgcgaagccgccgaactgctggcccagcgcggtctgatgccggtgccgggcggttacacctggcgcaccgacagccgcctgaccctggcttcgccgatgcgtctgaccgatgagcaggcgatggctttcgtgcggcgtgtgggctgtcctacacagttggtggtggccgcagacggcatgctggcgaaacattccgaattgctttcccagctaccctttaccgtcaccacgctgccgggaggtcatcatttacacctgaatgacgagcccggcgcggtccttgttgcagactgtttcaatcggttcttctgcgcgccttgacttggggcggtcaactgccgaggctgggcggattgaaagggagtcaaccatgaactacttcaacaccgctgtgacctccgatggccagggctcgttgatcttatgagcgtgcgtaacggatgtatccgtatcctgggcttgagccttctgagcccactggtatttgccgccgacgtaccgggtagccaggacctgcccaccgtggcccgccaggtcgacgcgcaaatcgtcgactaccgtcccgccgaagaaaaagaacgcatctaccccatgggcgccatccgcaagatcagcggccagttgcgttatgaaggccaggccaccgcgcggggccaagccactgccattacctatgagttacctgccgaacacagttccagtgccgcatttactgcgacgcgcgaagcgctgcaggcgaagggcgcgcagttgctgttctggtgccaggcccgggattgcggcgaaagcagcctgtgggctaatgaagtgttcggcaacgccaagttggtcggtgccgacggccagcaggaatacctgctgctgcgcctggcagccccccaggaaaactccctggtggcgctgtatggcatcacccgtggcaaccgccgcgcctatctgcatgtggagcaactggacgccaacgcgccgctggccgacctgctgcccacctccgcgacactgctgcgtgagttgaaaagcaccggcgagctggactttcccgcactgggcggcgagcctgacgacacctggttgaccctgatttcccgtgggttgaatctagataccaccttgcgcgtcagccttaccggcccgaacgccgaagcctggcgccaggccctggtcgacaaaggtgtgcgcgccgcgcgcctggaaaccggctccgctgaaaccaaaggcctgcacctgcatctgatacgctgaccgttacaaggcgaacggacccgcgccgttcgcctaagctctcttcctacagccttcttctagagatactccatgctcaataacgatcgcctactggtgcaaatcctgctgctggtgctgttcggtgccagtttctgggtgatggcgccgttctggtcggcgctgttctggggcgcggtactggcctttgccagttggccgttgatggtcctgctcacccgctggctgggtggtcgcgaatccctggccgccggcatcctgacgttgggttggatgctgctggtggcgctgcccctggtgtggctgggcttcaacctcgcggatcacgtgcgcgatgcgacggcgttgatcaaggatatccaggttgacggcctgccggaggcacctgcctggctcggctcgatccccttagtcggtgagcggctggtggccatgtgggacagcattgaccaacagggcgcggccttgatggtcagcatcaagccctacctggggcaggtcggcaattggttgttggcgcgcagtgcgcaaatcggtggtgggattctagaactgaccctgagcctggtcttcgtgttctttttctaccgggacgggccgcgcctggcgatgtttgttcaccgcctgctggagcgcttgatcggcgagcgtgccggctattacatcgaactggtggccggcaccgtgcagcgcgtggtcaacggcgtgatcggcaccgccgccgcccaggccctgttggcgctgatcggtttcctgatcgccggggtgccgggtgcgctggtgctgggcatcgtcaccttcctgctcagcctgattcccatggggccgccactggtgtggatcccggccacggcgtggctggcctggaagggcgattacacctacgcggtgttcctcggcgtgtggggcacgttcatcatcagtggcgtggacaacgtgctcaagccttacctgatcagccgcggcggcaacctgccgttggtcattgtgctgctcggggtgttcggcggcttgattgcctttggtttcatcggcctgtttatcggcccgaccctgctggcggtggcctacagcctgttgatggattggagtgcgacccaggcccaggggcggcgggaagacaagccgctctagacgcgtggcaaccacatcacggctgtcaaaccacccccgggggtttcttccaggtgcaaccgaccgccgaggcgttccgccgcttccttggaaatcgtcatgcccaggccgaccccgccggagttgcggttgcgtgagccttccaggcgatagaacggttcgaacaccgcctcgcgctggtcggcggcaatcccggggccatggtcgatcacccggatgaccagcgcttcgcggctgtccgccagttcgatgcgtgccgagccggcgtagcgcagggcgttgtcgatcaggttgttgaggcatgatcgcaacgccatcggttgcacttgcagcggtgcgcaggtcccgccgaactgcacatcggcgccctggtcctgggcgttttcgctcatggactcgaccagcgcctgcacgtccagccaatgccgggtttcgctggtgcgttgttcgtgcaggtagctcagggtagcgtcgagcatgccgatcatgtcgtccaggtcctggcgcatctggccttgcagccgggtgtcttcgatctgttccaggcgcagtttcaggcgtgacaacggggtgcgcaggtcatgggagacggccccgagcatgcgcgcgcgttggctgacttgctcgcggatgcgtcgctgcatcaggttaaaggtcgacgccgcttgctgtgcctcacgcgggccagattcatcgaggggcgggctgtcgaggtccaggctcaggcgctcggcggcttcactcaggcgctggatcggccggctcagcagcttggcgccgtaccaggctgcgatgatcaacgagatgaactggaacgtcagtggcaccaccgggccaccaaaccacggtcgcttgtgcctgggcaggtgtttcatcgtgccgtccggctgctcgacaaaggtctcttgaggcggcggtggaggtgggccgtaatagcgaaaccaggaaatggccagcacatgagccagcacaattgccaccagcaacacgccaaacagtcgaccgaacagcgtgttgaaggcgttgcgcatcagccgatgtcccgggcgtcgaacaggtagccttcaccccgcacggtcttgatcaattgaggggccttggggtcatccccgagtttttgccgcaggcgcgacaccagcaagtcgatgctgcgatcaaaggcttcgatggagcggccacgggcggcatccagcagttgttcgcggctcaacacccggcgcggacgttcgatgaacacccacagcaggcggaattccgcattggacagcggcaccaccaggccatcgtcggccaccaattggcgcagcacactgttgaggcgccagttgtcgaagcggatattggcgcgctgttcggtacggtcgtcacgcacacggcgcaggatggtctggatgcgtgctaccagctcacgaggctcgaacggcttggacatatagtcgtcggcgcccagttccaggccgatgatgcggtcggtgggttcgcagcgagcggtgagcatcaggatcgggatatccgattccgcacgcaaccagcggcacagcgacaggccgtcttcgcccggcagcatcaggtcgagcaccaccacgtcgaaggtttcggcctgcatggcctggcgcatcgccgtaccgtcggtcactccgctggcgagaatgccgaagcgggccaggtagtcgatcagcagttcacggatcggcacgtcgtcgtcaacgatcagcgcgcgggtgttccagcgtttgtcgtcggcgatcaccgcgcctttttgctcgtcgttcatagagacggaaggggtatgcatcatgcgatcatctgcctggttgttgcggtcagcataggcgcccagccccatggctggaagtgctggtcggtgggtcgtgcgagcgaggctagccgtggggcgtgttgggggcatgtcgtgaatgtatcagctttgaaataattacctgaaatgcccacccgatggcgcttggtcagtatttaccgatcatcggatcccgcaacgccgtcgcttgcgctacaatccgcgccgatttcgacttgcctgagagcccattccaatgtccgtctgccagactcctatcatcgtcgccctggattaccccactcgtgacgccgcactgaagctggctgaccagttggacccgaagctgtgccgggtcaaggtcggcaaggaactgttcaccagttgcgcggcggaaatcgtcggtacgctgcgtgacaaaggttttgaagtattcctcgacctgaaattccacgatattccgaacaccaccgcgatggcggtcaaggccgccgccgaaatgggcgtgtggatggtcaacgtgcactgctccggcggcctgcgcatgatgagtgcctgccgtgaagtgctggaacagcgcagcggccctaaacctctgctgattggtgtgaccgtgctcaccagcatggagcgcgaagacctggccggtatcggcctggacatcgagccccaggagcaggtactgcgcctggccgccctggcgcaaaaagccggcctggatggcctggtgtgttcggcgctggaagcccaggccctgaaaaccgcgcacccgtcgctgcaactggtgaccccaggcattcgtccggcgggcagtgcccaggatgaccagcgccgtatcctgaccccgcgccaggcgttggatgcaggttccgattacctggtgatcggtcgcccgatcagccaggcggccgatccggccaaggcattggcggcagtcgtcgctgagattgcctgacacttgaaagcgaacacagtaaaaaatgtgggagggggcttgcccccgatgacgattgctcagccaaaaatgtagtggctgacccaccgctatcgggggcaagccccctcccacattttgctctgcggtgtgtcagctgaccttgagcaccaacttcccgaagttctcaccgttgaacaacttcatcagcgtttccgggaacgtctccagcccctccacgatatcttccttgctcttgagcttgccctgggccatccagccggccatttcctgcccggcagcggcaaagcctgcggcgtgatccatcaccacaaacccttccatgcgcgcgcgattgaccagcaatgacaagtagttggccggacctttcacggcttccttgttgttgtactggctgatggcgccgcagatcactacgcgcgccttcaatgccaggcggctgagcacggcgtcgaggatatcgccgccgacgttatcgaaatacacatccacgcccttggggcactcgcgcttgagtgcggcaggcacgtcttcgcttttgtaatcgatagcggcatcgaagcccagttcatctaccaggaacttgcacttgtcggcgccgccggcaatgcccaccacacggcagcccttgagcttggcgatctgcccggcaatgctgcccacggcaccggccgcgccggagatcactacggtttcgccggccttcggcgctccggtgtccagcagcgcgaagtaggcggtcatgccggtcatgccgagggccgagagataacggggcaggggcgccagttttggatcgaccttgtagaaaccacgcggctcgcccaggaagtaatcctgcacgcccagggcgccgttgacgtagtccccgaccgcgaatttcgggttgttcgaggcaatcactttgcccacgcccagcgcgcgcatcacttcaccgatgccgactggcgggatataggacttgccttcattcatccagccgcgcatggccgggtcgagggacaggtattcattgcgcaccagcacctggccgtcctggggcgtgcccaccgggacttcctgataggtgaaggtgtcccgggtggccgcgccgaccgggcgcttggcgagcaggaattggcggttggtctgggcgatcatggcagcgactcttctggaaatgaacctgaagtgatagaccctgaacgggccgggagcaaggttcaccgagcgtgcgaatgccggtcgataggtgttgctgatagtcaggtggcgcctcttatcactgtgatgcatgcagcttcaaccggccttttgatagtgctgacgcgcctggcgctgcgttggctagactcgatccacgactttccctcacaggacatcctcatgagcatgacgttttccggccaggtcgccctggtgaccggcgctgccgccggtatcggccgcgctaccgcactcgcgttcgccgccgaagggttgaaggtggtggtcgctgacctggacgttgcgggcggcgaaggcaccgtcgcactgatccaccaggctggcggcgaagcgctgttcgtgcgctgcaacgtcacgctggaagcggatgtgcagcaattgatggcccagaccctcgccgcctatggccgcctggactacgccttcaataatgccgggatcgagatcgagaagggcaagctggcggatgggaccctggacgagtttgacgccatcatgggcgtcaacgtcaaaggcgtgtggttgtgcatgaagcatcaattgccactgctgttggcccggggcggtggggcgatcgtcaacaccgcgtcggtcgcggggctgggcgcggcgccgaagatgagcatttatgccgcgtccaagcatgcggtgatcggcctgaccaagtcggcggccattgagtatgcgaagaagaacattcgcgtcaatgcggtctgcccggccgtgatcgataccgatatgttccggcgtgcctatgaagccgacccgcgcaaggccgaatttgccgccgccatgcacccggtcgggcgcatcggcaaggtcgaggaaatcgccagcgcggtgctgtacctgtgcagcgatggtgcggcctttactaccggtcacgccttggcagtggacggtggcgcgacggctatctaggaccgcaggtcgccctccattcgaaaaggtcatggagggtgtgaggtttttccatagctggcacggtgccttgtcagaatgtgtatcagtaggtaaataacttaataaaatcaatactttaataagaattggcgagcggccgacgtgggcttccgtgcttaactgtctcgggttgaattacagacagttgaagtgagtggcgcatggatttagggatcgatcgacaagcccttgtaccggtggtgcagcaaatcatcagcgcggtggcgcaatggattcgcacgagtggggcgagccctggtacacgcttaccctccgttcgccaggtggctctcgataacctgctcagccagtccagtgtgatcgaggcattcgagcggttggtcgcccagggcctgctggtttcgaaacagggctcgggtttcagcgtggcccagccaccgaccgtgcacgaaagccagtggtacgaaggtgccgagcgggattggggcgccttcgcggataccccgttgggtgagctgaaactgggttgcggctggctgccggatgcctggcgcgaaagcgatgacatcagctacgcgattcgcgaagtcacccgctgcgacacggctgcgctgttcaactacagcaccccattggggctcccggcgttgcgcgagcaattgctcaagcgcctgacccaggcgcacatccccagccaccttgacggcatcctcaccacggcgggcgccagccatgcacaggacctgctgatacgcaccttactcaaggccggtgattgcgtggtggtcgaaacgccggggtacggcaacctttatcggcaactggcattccatggtgtgcaactgctgcaggtgccacgcacccgtggcgggccggacatcccggcgcttgaagccttgcttcagcgttatcggcccaagtgcctgttcatccacagcctgtatcacaaccccaccggttcaagcctgagtcgcaccgtggcggagcgtgtgttggagctggcgcaccgcgagaactttttgattatcgaggaggacgtgttcggtgatctgcaacacgccagttgcacgcgactctcggcgttaccccacggtgaccgggtgatctacgtcgcaagcttttccaagaccctgagcagcgccttgcgcgtgggctatctcagcgccagcacggcgatcatcgcgcaattggccagcctcaagactttgaccggcttcggcacttcgcggtttgccgaggccgtggtggcgacactgctggcaaatggcacctatcgcaagtgggtacagcgtctgcgcaagcggctgagtgcgcaaatggccgcgaccttgcaggtgctggaggatgaggagtgggaggtgttcgccaaccctgccggcgggatgttcgtgtgggcgcggccaggggtgggggatcggtcgcggttgcaggcgtgtgcccggcggctgggggttttgttgtcgccgggggcactgttcagtccaacggatgagcccagtgagtggctgcgaatcaatgtggcctatgctgctgatcaacgggcactggcgttattccgcgccatgggacctgccagatcgacctcgaccattctgaaaacgacgggcgtgtagctttttgccattattgtggcgccaacgacttgtgttcggtgccttgtggttgccaatctcgcttgtgtaaaccgggcttgatggcatctgccattgcaagaggatgcaagtgcaatgatttcggccgtgcaacgacgcttcgccaacctcggtatggcaaaaaaactgggcttgggcttcaccctggtattgctgctgaccgccctggtcgcggcgatcggcgtgtggtccctgcaaactgttggtcagcgcttcgaaggcctcaaggccatgtcgtcgctcaacagcggcttgctcagggtacgcctgatcgagcaggactacgcgttgcatgccgaccccaaggccgtcgacgccctgcatgaaagtgtcgatgccttggccgccctcgcggcgagcctcaaggcccagtcggcggccaacgtgccggtcatgaccgatgtcgaacaggccctggccgcctaccgcaaggcgttcgatgagtttgtcgagctgacccagaccaaggacttggcgttggaaatggcaagttggtcagtgtccagcgtggccaataacctcgatgtgttgcaggccgggctggctgacgacggtgcctatggcctcaaggaaagccagggcaaggagggcgccgagtttatcgagcaggcggggcaggtcagccaggtttcacggctgatgctgcaagccatgaacgaagcccacgtacgtctggaccagagccgcaaggtggacgctgatgacgccgagcaaggcaagatcgagcaggccgaccaggcgctggcccaggttgaaacactgaaaaccgcggtcaaggaccccggttaccagacggtgttgaatgaggtctccgggcatattgcttcgttcagtgaaaaactcggtgaatacaccggcctgctggcccaggagaaggtggtctacaagcagttgcgtgatcgcgccgagcaagtggtcagccgggtcaaccaggcttacgacaccgaagacctgtcgatgcaggcgcagcttaagaaaagcgcgatgctgatcatcggctcttcggccttggcgctgttggtggggttgattgcggcctgggtgattacccgcctgatcgtcgcgccgctgcgcagcgtgattgcggtcgcccagcagattgctgccggcgatttgagtgggcgcatggacgtcagtcgccgcgatgaaatcggccaactgatgcatgcgatgcagcagatgggcaatggtctgagccagatggtcagcggcctgcaggccggtatcgagcaactggccagctcggcgcattcgttgtccagtgtcaccgaacaaaccaatgtcgaagtcagtagccagaaagaagaaaccgaacaggttgccacggcgatgaatcagatgaccgctaccgtgcacgacgtggcgcgcaacgccgaagaagccgcgcaagccgcacagacggcggacgacaaagtcgacagtggccagcgggtggtgcgccagagtttgcagcgtattgaattgctggccacctccagcaccagtgccagcgccagcatcgagagcctgagcgccgagatccagaacatcggcactgtgttgagtgtgatcaaaagcgtggccgaacagaccaacctgctggccctcaacgccgccatcgaagccgcccgcgccggcgagcagggccgtggtttcgcggtggtagcggatgaggtacgggcgttggccaagcgcacccagcaatcgaccgaagaaatcgagcggctggtcagtaccttgcgcaacgcggcacagtcctcggtgcagcagatccagcaaagcggcgaactggtgaagctggcggtgagcgatgccctggaaaccgagagcgccctgggcagcatcgcggtggcggtgtcgctgatccagcagatgaaccagcagattgccgcggcggccgaggagcaaagctcggtggccgaggagatcaaccgtagcgttaccagtatccgcgccagtgccgatcagtcggcgctgagcatgcagggcaacgccgcatcgagcattcagctggcgcagttgggcgcggaactcaaagggatggtcgggcacttccgcctgtgatcgcagcgttcatgcggcgatcacaggggagggcggtcaggcgttgttggcgaggaaggtcagcagggcttcgttgacgaagtcggggttttccctggcgctgatatgcccggcttgcgggatcaggatcaggctgcagccgatcaggccggccatttcctcggactcggcaggcgggcgcggtttgtcctgttcgccgcacatcaccagcgtggtgtcggcgtccagcttcggcaactgctccagcacatcctcgcgactgaagatcaagcgacccaggggcacgatgctctgcagcaggcgctccttggagtagccctgcaattgctggcggaaatcctgatacagcgcggattcgcggtcgatacccgggcggaagaagatcggcgcgaccacgtccagcaacggctcagggatagcgccggcgtcttcgatcatcttgaatagcgagaagtaatactggcgcgtggcctcgggctcggcacccaggtaggtgtccatcagcaccaggctgttgatccgctcgggagccagcagcgccaaacgtgcgccccacataccgccgaccgagaggccgaccaggttgatctgtggaatatccaactggtccagcagggccagggcctggcgcgcgaggtcgtcgagggagtgggttggcgcgggcagcgggccggattcgccatggccccacagctcgggcacgatcacccggtactgttgcgacagggcttcgatctgcggcgcccacatgtcgcggtcccacaggtagctcgagcccagcaggacgacggggccggaaccctggtcgacgtagtgcagcggttgtccatcaatgacggcgacaggcataacgggcctctgacttcatggagtgaggggcacttttttacgctagtcgggggcggggggatagatgcaaagtgatggcatctcgggaagcggcgaggttgtttgtactgacctggcttttatgactgtggtgagcgggctcaccacaggccagtcttcaagccagcgaatcagtcgtagatgactttcttcttccactcggcgtcggcgtcgaccactttgaggccttcggtcagttcgttgacttcgtcttcagccggcttgctgttggtcagcaccgtggagttggcgcgtcccagctgggcttccaggtgttgcagctgggcgctgtagatcaccggctccggctgtttgcgcaggtactgcacgccgcgttcgaatgccagtcgcgcttggcccggctggccttgttgcagggcgtgctggccgaggttgttgaagaactcgatatgcagcaacaccaggatatggcggatctcgcggatccagtgcttggcctcgttggccggcaggaaaccgtcctgggccgcacgggtgacctggccgtgcagggcttcgagcaggaaacgcacatccttggccttggcttcggtctggatcggcgcgggcgggttgttcaccgggatcgattcgccctgggccaccagcgtattcaactcggtgatgcgggccttgagcggcgcgctgcctttgttcaggttcagcagccgttggttgacgttgagttccaggcgggtcagcaataacttgagtgccggggtcatcaattggccggggaaggtctcggtgatttcaccgcagcggcgcaggcgatcgttaagctcgatctcggtgcgcttcttttccagcttgttgttttccaccacgtggttcatgtagccaatggcgatcagtattgcgatcccggctattaccagcagggtgatcatgagtggtgtcaccggtgtgacctctttatagggtttacagtggagtgtagtgactgggccatccggcggataggactgatcgaccagctgcccgggtagtttgcttctatatggataggcgttccctgcatggatgcacattgccatcatttgccggaacgaactatagcgtcttgtcgggcgccataatataggcgtcaaagcccggacgtgcacaattgccccatgagctcgaaaagctgggggaagtcattgattttaataaatttatccttgggggttgacgatctttcaatccgtccatagaatgcgcgccacttaacgcgtaaagcacacagcaaaacgcggttaagcagtgaatgttgtacgtgtgtccccttcgtctagtggcctaggacaccgccctttcacggcggtaacaggggttcgagtcccctaggggacgccatttgcgggaatagctcagttggtagagcacgaccttgccaaggtcggggtcgcgagttcgagtctcgtttcccgctccaatttaagcagtgtggctctcgggcggcactgagtgaaaccagggcatgatcttcggatctaacctctggacactgaaatacacaccatgtgtttcagttgtgtgtccccttcgtctagtggcctaggacaccgccctttcacggcggtaacaggggttcgagtcccctaggggacgccatttgcgggaatagctcagttggtagagcacgaccttgccaaggtcggggtcgcgagttcgagtctcgtttcccgctccaatttaagcagtgtggccctcgggcggcactgagtgaaaccagggcatgatcttcggatctaacccctggacactgaaatacacaccatgtgtttcagttgtgtgtccccttcgtctagtggcctaggacaccgccctttcacggcggtaacaggggttcgagtcccctaggggacgccatttgcgggaatagctcagttggtagagcacgaccttgccaaggtcggggtcgcgagttcgagtctcgtttcccgctccatattcaacaaaaacgccgatcagcaatgatcggcgtttttgtttgtgtgcgatttgtgcagagccgccgcaggcccgctgcggcagcgttcactgcgtcgtcagggcctcctgcgccggcatgaaaaaacgcgcaaacaactcggattgagacttgatgttcaatttgttgtagaggttgcgacggtgaactttgatggtctctgccgacaggttcagcttgccggcgatttctttgttggaaaaaccgctcaacagcaacttgagcacatctttttcgcgcgccgtgatttgcgtgcccagttgcacgatggcctctgaccagggtggcggttcgtcctggcttttttccgcatcggtctcaaagcacatgcgctgatgcatcaacgccattacccatggcttgatgatgtccagggtcgcgatctgctgcgggctgtagcgcacgttgctgccaaatgaaatgcacagcgttctgtcggcgtcgagttgtacgttgtactgcacctcatccacgctgatgtactgggcgaaatactggtggtaatactcggtggtcaggaagtgctccggcgcgatgtcggacagatgaaaaaagccgctctgcgggttttcgcggttggcaatgtagaacgggtcgagcaggtacagcccttttacatagcgctgggtcaacgcgtccacttcgtccgcatcggcgacctcagtcacgctgaccacccgtacctgctggtcgctgaagatcagcacgacccagttgtcgatctggacgtattcctttaacacacgaaccagtgagctccagaacgccgggcggttcagttgcatgatcagcgtcccggccgaccgatgccaggccaggttgtgaaggtcgagcgacatgtactacccctttagggttaggcattcatggggcggggctaagtacttctaggtatttactaatcggacgtgccgagtatattcacccctcagcggatgaaggccatgatggcctgtcgtttttgacaaggatagcgatatgagtcaaccccctttgcgcgccatgttcatggcggcgctggtctgtgtgggcgcgagcgcgccggtcttggcggccgaaccccgggtcaacctgtacaactggttcgggctgatcgccccggaaacacccaaggaattcgagcagaaaaccggcacccgcatgcacatggatgccttcgacagtgccgagatcatgcagagcaaggtcatggccgggcgtaccgggtatgacgtggtcgtcgccacgtcgaatgtcttgcccagcctgatcaaggccggcgtactggcgccgctggaccgctctcaactgagcaacttttcgcatatcgatccggagatgctggcgctgctttccgccaatgacccgggtaaccgctacgccgtgccctacctgtggggcaccaccggcattggttacgacgtggacaaggtcaaggccgccctgggtgagaatgccccggtggacagctgggacctgatcttcaaggaagagaacatcagcaagctcaagtcgtgtggcgtggcgatgctcgactccccgagtgaaatcatctcgatcgccttgcattacctcgggctgcccagcaatagccagaaccctgaggattaccagaaagcccaggcgctgctgctgaagatccgcccttacgtcctctactttgactcatcccgaacggatgccgactttgccgatggcaatatctgtgtagtcgtgggctgggcgagcggggcgctgatggcacaggccatcaatgaaaaaaacaacaccgggcgcaagattgcctacagcctgccgcgtgagggcgggttggtgtggtcggaaaacttcgtgctgctcaaggatgcgccgcatgccaaacaggggctggcgtttatcaactacatgcttgagccgcaagtgattgccaagagttccaaccacacgctgtaccccaacgccaacaaggatgccaccgagctggtcgaacagaagttgcgcgacaacccctggatttatccatccaaagagaccattgccacactggttccccttgaaccgctgcccttgaagttggagcgaatccgcacgcgtgtgtggaccaaagtgaagagcggcacgtgaccggctgaatgaccaggcatgtcgggcggttgcaggcgtgccgttgaaggagatcaatcatgggccaagccgaatatcagcgcgacgtgaagtcggacgatgacgaggcgtacacggaaatcgaagaacagatcggccactgtacgcccgaacaagcctgggccatgtattacgtctcgaccggcatggtgcgtgagtacattacgcgggcggtgatggagcacattggccggggcaaccgggcgctgctgctggagttcccggaactggcccgggccgaagagaaatcccgcttcctgctgccgctctaaccgcatgccgatcagtgatgatcggcatttttgtgtgtgcgcgggtttgccgctttggccaggcgcaccgtggcctcacggatttctgcctgattgagtgaggcaaagcccaggcgcagtgcgttttccggctggtccatcggtgaaaactgccgaccactgcgtacgaccagcccatgctccaatgcggttgccaccatctgctcgacgtttatccgatcttcaaaacgcacccacagcgccagcccgccttcgggttcgcgcaccctgatccgatcaccgaatgccgcatgcaggcagccctgcaagacttcgcggcgggcgcggtattccttggatacgcggcgcaggtgtttcttcaattcacccgcgttgatcaggtccgcgagcatcttctgcgccaccgcgtcagcatcgcccagcatcaacgcggcgttgccgtgcagggcttcaatgaccggtgtgggcgccaccacatagctgcagcgaaacgtggaaccgagcgccttggacaacgagccgacatagagcacatggcgctgcgaacggtcactggccagcggcaggtagggtcgcccgttgaagtgatattcgtggtcgtaatcttcttcgatgatgcagaagtcatgtagagccgccaatgccagcagctgttgtcgccgcgccgcgtgcaggctcacggtggtggggaattggtggtgtggtgtcagatagatcatccgcaccttgtgctcgcgacacaggtgatcgatctggtcggtgcggcagccttcgtcgtcgacgtccaccgtgaccagttgcgcacccagcttgcggaaaatctcccacgccggcgggtagctcaggcgttccaccagcaccacgtcgccaggcttgagcagcaggctggcgctcaggtacagcgacatctgggtgccttgggtcaggcagatattctcggcgctgaccgtcagcccacggttgttgctcagcatttcggccagggcacagcgcaactcatagccggtgccctcactgccatagcgcaccgtattagaggcgaagctgttgcgcagggcattacggtagtagcggtgcagcacggcttggggcagcaggcggtggtcactggtaccgttgtcgaaaaacagtgcgccatgccgatgctgcagcgccgtcacctgggcgttctgagtgaagtacggagcgttcgcctgcgccaggaggggcggtgcaaacgactgctgcacgcgggcaggcggatgcttgggcgccaattgcgcattgacgaaggtcccacgccgcggctcgctgaccagccagcctttggtcatggcttcttcgtaggccaggatcacggtcttgcggttgacgtcgagcaactgcgccatttcccgcgtacccggcagcaaggtgccgggcggcaagcgaccttcgacgattgccgtcaccaggccttcggcgatcttgcgataggacgcctggctggcgctctcgtccagcttgagcagcggtcgccatttacgcatctggaccatctgaagtatccaaaactggaggttttaatgggcctagtctagcgcaacaatcaagcctcactcacccctgaggttgttatgcacacacgtcatgtcatcgaactgtccccctcggggaaaacctttgcggccggtgacgaactgttgctggatgcgatgcttgccagcggtctgtcggtgccgttctcctgccggcgcggtgcctgtgggtcgtgcaaggtggtcgtggccgaaggggagtaccgggccaagacccttgcgccggacgcgccggcgccatgctatccattggccgccaatgaaatgctgttgtgccagagtcatgcctgcggcgacatgcgcctggaaattcctggctggtcgctggatacgccgacgctggtggtcgaggcacaggtcgtgagcaagcgcgcgctggctccagacatcgttgagctggtgctgatgccggacatgccattggcggcacgggagggccagtacctcaagttccgtctggtcgacggcgactcgcggtgcttctcgatcgccaacctgccggccgacgacgatgggcgcctggtcttccacattcgccgggtcagcggcgggttgttttccgaggtcctcctggacgacttgcacgctggcgatctggtgcaactggaggggccttttggtgcctgcacctggcaggaccatgacgatgcgcccgtggtcctgttcgccacgggcactggctacgccggcatcaagccgatcctgctgagcgccttgaagtgcaatgtcgaggtgacgttgtactggggtggcgcgcagccggcggacttttacgaccgtgtgttcctggaccagtcagtcatcgaccatccgcgttttcactggcacccggtgctggcgtcgcaggggcgggtgcaggaggtagcgctgggccacgggcatcactgggatgccgcccatgtgtacgcgtgcggcaacggcgcaatgatccgccaggtccgcgagcagtgcctcgacgcgggcttgccggctcaccggtttgtcgccgaagcctttgtgcccagcggtggcgcaggtgcgcaaacgccttcacctgcgtttgacccgatctgggaaaaggtcggcccccgttactcgttcgacggcatgctggcggcccgtgaccaatccatccgcgccctggcggccattgccagccggctgcgggtgggcatgactaccggcgaagccctcgacatggccgccgaacaactgctggcgatgggcgcgtcacacacctggcacccgacctatattcgcttcggcgccgacacggtccgcccaccccgcgaagggatcgaccgtcagcgcaggctgcgcgccagcgatatcgtcgtggttgacctggggccagtgtgggacggctacgagggcgactatggcgatacctttgtgttcggtgactcgccgctgcacctggcgtgcacgaccgcgctgcacgaagtgttcgacgagacccgcgacgcctggttgcgcggcctcaccggtcgcgaactgtatgacttcgccgagcagagcgccgtggcaaaaggctggaggctggcgcgcaatctcgcagggcatcgcctcgcggacttcccccacgcgttgttcgagaacaaggagttggcggatctggacatcccgccgagtgaaatggcctgggtgctggaaatccagctgtgccatcccacggaaccggtcggtggatttttcgaggatatgttgatgctgcaagcctgaagagcccgccattgcggcgggctccttaacatcagagcttcggcagttggccgatacggcccatcatttcggtgacgatctgcaggtcgagcaggaactggtcgacggtcttgaactcgccgtcggtgtgcccggtgtacttgacttccgggcgcgccaggccgaattgcacgccgttgggcagttcatgcaccgaggttgcgccggctgaggtgccgaacttgtgctccatgccgaggttttccgtggcgactgccagcaaggccttgacccactcaccttccggattgcggtacatcggctcggccaccgagtaggtgaagcccaccttgaccttggttttcttgtcccaggcgctcagtttgtcggcgatttcggccttgagtttctctggcgacttgcccttcggcacccgcaggttcaccgccagcttgaaggctttgtcatccaggccgacaaaggtcagcgaagtggtcagcggccccatgaactcatcggagaagcccacgcccaacttgccgcccaggtagtccaggccccagttgtcggccgcataccgcgccgcatcggtgatgtggttgtgcttgagggcgatcttgccgtcgacgctgtggatcagctccagcatgcgcgccaccgggttgaccccggactccggctcggaggagtgagcggacacgccggtgacggtcagcttgacgtctttgccgtcgaccttggcggccactgcaaaatcgccgccgttgcgcttggcgtattcgctgccggccttttgcaggctggcggccaactcggcaggtttgtcgctgacgaaggtcgccaccgacgccgacggaatctggttggtagccatgccgccggtcatcgcgatgatttccgcgcctttgccttcacccttgcgccgtgggaacgtcgccatcaccgtgccgtagcctttctcggcgatcaccaccggataaccgccatccagcgcgaggttgtactgcggtgtcgggttcttttcgaagtagtaggggatcgcgtcgccggaggtctcttcggtggtgtcgaccagcagcttgaaattgcgcgccagtggcagcttttcttccttgatcaccttcatggcatacatcgccacgacgatgccgttcttgtcatcttcggtgccacgaccgtacatgcggtcgccgatcagcgtgaccttgaacgggtcgagtttggtgccatctttgagcacccaattttccggcgtcaccggcaccacatcggcgtgggcgtggataccgacgacttcgtcgccactgccttccagggaaatctcgtacacgcggttgtcgacgttgcggaagttcaggttgaaggccttggccaggtcctggagcttgccggcgatcttgatgaattccgggttcttgtactgcggcaggccgtcgacgttgaaggtcgggatttccaccagttcgcgcagggtttcgagggcggctttgccgtacttcacccgagtgtagatgcccagcaggcgattgatttcgttctgctggtcggcgctcaggggtttgttgtcgaggaaggcattgattgccgggccgacgtcgctggtcttgcccaggtcgcctttagccagcgcgccgaggaaaccgcgaaaatcggtgatggacgtttcgttgaagttcttgagaatcgccgtgctttgctcgggcgtgatgttggcgaaggcggggcaggtaaccgccgacaggctcgccgcaaacagggtggcagccgccaattgcttgagtggaaagtgcatggagagacgcattcctttgcaggtagtgagtaggaggtttctgatcgatctgtcagaaacatttccacacactaccattagtcaggtgcctctggtcaatgctggccaggatggggctcggggtactcctcagtcacgtccaaggctctggcgtagggcccatcccacaactgctcatgcaattgcccgacacgcttggccatcgcttcgttgtgcatcaccacttccaggttgcgcgaattatccaggtagccacccagccaattgctggtgccgacccacgcaacttggccgtcgatctccatggtcttgctgtggatcacccgcgcatacgggataaacccttgtttggcctcgggcagggtcacgatcttgatctgcacgttgggcagcacggccaggctcttgaggtagggcagctccagcttgtcggtgttccagttggacaccatcagcttgatcgacaccccacgcgccgctgcagcgcgtacggcgttgtcgatcaccgcgtagtacggacgggtcttgtccggtccgtaggacaacggcgcgtagtccagcaattgcacgcgcacttcctgcttggcttcgctcaacaggcgcggcagttccagctgtgagtcgcccacgccaggcgggttgtagcgctgcgggctggcgaccaggtagttgccggtgcgcggtgcctccttgccagcaacgggcagcggcaccggctggttgtcggtcaaggcctgctgggcgttccagtcctggtcaaagatggcctgcacttggcccacgaccgttgcatcggtgatacgcagcccggtttcgtgaatgtgttccagcgagcgccaatcgaaattctggctgccgacaaacgcctgcttgccatccactaccaggtatttggcgtggatgatcccgccactcacacgggcgtagggcaagacgcgaaaggtcaggttggggatcgcgcgcaggcgttccagggtggaggcctccgacaacttgatgcctttttcttcgagcaaaaagcgaatcttcacaccgcgtttgccggcggcttccaggcgctcgatgacacggtccatcaccgaaccggggtgatcggcggcgtagaactggccgatatcgatgcggcttttggcgccgtcgaacagctcgctccagaccgggccgggctggcgcaggtcgtcggtgccgagggcgctgtccaccggtacggtgtgtaccagttcaaaccccggaatcgaaaagtccgcctgggccagcggactgaggagcaagccggcaaggccggcgatacgcaatttcaaggagacggacataacactctcttcactgatgtagtgagcgggcttgccccgcgctgggtggcgcagccgccccaaacattccaccgcgttgtcccagaaagaccgaggtgcctggatatggggtggctgcgccacccaacgcggggcaagcccgctcaccacaggtttatgcggtgcggctgtgcagcggcgtcggtacccgatgcggcacttcactctgcacacgggcaccggtggcggcgcggatcagcaggatcttcagctggtcgttgatgcgctccaggctgtcctggaagaagttgtggaacaccacgcagaacagcgcgatggcgatccccaggccggtggcgaacagggccgtgccgatgccgccggagatctgccctgggtcggacacgcccgccgtcgccagcgccttgaaggtgtcgatgatgccgaggatggtgcccagcaagcccagcagcggcgcggcggtggtgatggtttcgatgatccacaggctgcgggccagcggcgcgcgggtggtcaggtactgggtttcgatgacgtcatccagatccttgcgcgagccttgcgaggctttctgtgccagcaccggcaagaccatgctcagcggcaggctgtcacgccgggtcaggctctccggcaggtcgcgttcgctgtgcacgttggcgccgagcacctcgttcagcgcgcgggcctggcggcgtacatacgcgaagtaaatcccgcgctcgatggtgatgaagatcgcgatggccatcgcggcatacatcacatagaaggtgatgtcgtggagcaggttcatgtccatgttcacttacctcgcaattagaaattggcttccagggaaaccgtcacggtgcgttccaggcccacgatgtaggccgggtcgccgtcgcggaaaccgccgtaggtggccgcgttggtcttggtggtgtacacaccgtccaagtacttcttgtcgaacaggttgtcgacgttcaggcgcagggtcgcgtccttgaccaccttcttgtccactggcaggtagataccggcgccggcgttgaatacggtgcgcccggagatcgcttcgtcgttggtcaggtcgccgtagagcttgctggtgtacttgccgccgaaggtgccgtagaagcggccgtcgtcgtagccgatgttggcggccagcatgtttttcggcacgttggcgaactgcttgccgctggtgggcaatacgatcgctttgccggcgttgtatacggtcaggtcgtcttgctgctcggccttggtgtaggtgtaggaggtgtagtagttgaagtgattgggcagcaggccgctccactccagttccaggccgctgttgttgacggagccggcgttgatgtcggcgaagtcgccgttgatatcgcgcgacgacacctggcgatccttgaactgcatgtagaacaaggtggcggccacggtcatgtcttcatcggtgtagcgccagcccagttcgtggttccaactggtttccggcttggcgtcgatggagcctgcgcccttgtcgtacagcacgtagttctgcgggatgcgcatgttgcgcgacaggctgtagaacacctggtcgcgttcatccacctggtatttgaggccggcgttgggcagcagtttgttgtaggtctggttacgtttttctgcttgctcggtgaggctgccatggttggtgccgtcacgcttgacgttcatataggccagaccgccgatcagggtccagtccgagttgatgtaccaagtgtcctgggcccagaccttctgcgccggggtgatggtgaagcggtcgcggccctggatggtgttgccattggcatccaccaccgcctcattggagtccggccaggtatcgaccggcttgccattggccttgagcggaatgaacggctgggtctggctctggcgcgcgcgctcgtaccagtagcccacttgcacgctgtgatcgcccaggtcccagttcagtttggtggtgatgcccggacgccaggtctgggtacgtgaagggcggtagtacacgccgctgttcggggtgccgtcggcgttgtattgggcgccggtgggcaggttgcccaggtcgaacacgccgccctggttcgagccgcggttgagggcatagctggacgagccgacgccgctgccgttaccccagtagtagtacgggatcaccgacagcgcgaggttgtcggccagtttgaactgggtgttgagcacggcggtgaacgtctggaacgggttctgcgccagggcgtaataactgttgtacttgccgttgctacccacggtgggcgtggcggggtaagggtcgtacttgcggccgttctgctggaactgcgccttggtcagttggctgtaactgttgttgtcctgctcatggtacttgaggatcaggttggcggtgttgccatcgccggcatcgaagaagctgttccactcgactttgtccgcacgcacggcgcccgaaccgcgccacatctggccttcggtgtgggaggccgacagccagttgctcaggccgttgatctcgccggtgttgaggcgggcgaaggtcttgcgggtggcgttgctgcccatgacctgtttgacgaacgcaccggtttccttggtcggtcggatggtcacgatgccgatgttgccgccgctggagccgatgtgcgggccgtcggcttccgaggaaccctgggtgacgaagatctggtcgatgttttccggatcgcccagcaggttggagtacagcgcgtagttgccggagtcgttgatcggcatgccgtccaccgacatccccacctggtcggagttgaggccgcgcatggtgaagcgaaagcccgacaggccggtgttgtcttcgctggaaatgttcaagcccggggtgtacttgagcttgtccaccgcgttgccggtggcggtctgtttatccagcgcttccttggtcacggtggagcggcccttgatgctttcttcctgcaccatgtagccgccacctgccgtggccttgccctgaaccccaatagtcccgacgtcactgtcgcgggtgtcggccatgaccattccatggcccatgcttgcggcaacaagtgccagatgaatccgtgtgaacctcatctctgtcgtcctggtgtcgggtgcttattgcacgctgtagttgaaggtggcggtgaagcgctgctcattgcggcccccgaaggcttgctcggggaacggcttgacttgcttgatgcgacgcaagctgttggtggcggcccggttgagcaacatgctcgaggcctgggtttgcaagccggagtcgaggacccgaccctggcggtcgaccagcagccagatcaccacttcgccgctcgggcgttcgagggaagcctggcgtccggtggggtactgcttgtaggtgtccaactcgttgcgcaaccccttgaggtaaccgccttccagcgcttggccgtcgaccttgggcggggcgggcggcgcgggtgtcggtgctgcctgggccacaggtgccggtgccggtttggcggcgaccggaggtggtgtcggtactggcgttggcttggccaccacgggcttgggcacaggttttggcttgggctcaggcttgggttttggctgcggcttgggcggtggcggcggcggggctggctcggcctcttcatcctcgatcaccggcggtggcggctcttgttccaccaccggttccgggatcacttccggctccggctcgaccaacgccagctcgacggcggactcgtcatacaccggttcgaccttcaaggtctgggactggatacccagtgcaatcagcaccagggcgatcagggccgggacactgcccagcagctgacgcgcacgaaacaatacgtacatgatcaggacttacgcgtggcaatggacacggaggtaaagccacccagacgcagggtgtccatcacctccaccaggcgcgaaacctcgacgcctttgtcgctgttaacgatgatggtcgacttggtgtcaggcttttcggctgccttcaacgccggcaccagcgcatcgaccgtgaggtccttgccatccagctgcaactggccttccaggcccagggtcaggatgaatttgttctgtggcttgagctgctgcgaactgctggcgctcggcagctgggtcttcatgccgagggccggaatcacgttcaggctcacgagtacgaaaaacaccaggaggaacatcatcacgtcgatcatggggatcagttcgatgtgcgccttgcgttttttcggttcgtcccaggttctcattccgctaccccgttattgaattaggggcgacacgctaacaaccaaaaatgaccgattggttaactttaattgacggttttagggctctaggacgcgtctttcagatgactcttgagtcatttttgtgacgtaacagaattgaaacccggcaggggcattctcaaaaactttacatcgagggcccccagagatgagtagcgaattgccatgtctttccaccccgcggcttctattgagagcactggaaaagcaccaggccgagacgttgtgcaccctcgccaacgggccgaagatcgccgataacacggcgagtattccgtcgccctataccctgcaaacggcgcaggattttatcgacggcatgcaggagaaatttcgctctgtggggttgctgagcctgggcgtgcatgtgcgcgacagcggcgaactgatcggcatcgccagcctgcgcatcaatgcggctcatcactatggacaccttggcggctggacggcggcggatgcacgcaacctggggtatgcgaccgaggccgcgaccgcgttgatggactacggctttggcgaacttggcctgcaccgtgtgggcagccagtgtttcagtcgcaacaaggagtcggcgcgggtcatggagaaaatcggcctgcagtacgaaggctgcatgcgtggggcgtttctcaagaatggggtgcatgaagacatgctggtgttcgccaccctgcgtgaggattgggagtttcggctgtgagcggcgacgttgatcacggtcggcgccgggtcctcgccgggctggccgttgccaccaccttttcgatcctcagcccgtttgcgcgcagtgccggggtggactacccgttcaccttgggcgtggcctccggcgatccattgcccgacgggtttgtgatctggacgcgcctggcgccgctgttcaatgccgccgatggccggggtggcttgagccgcccggtgccggtgcgctggcgagtcgcccgcgatgcggcgatgacccgcgtggtgcgccagggcgaggtcatcgccactgagcgctgggggcattcggtgcatgtggaggtggcgggcctggagccgggcaggccgtactggtaccagttcgaagggctcggcgcgcaaagcccggtggggcagtcgcgcacggctccggcggtgcatgccatggtgtcggcacgcttggggtttgtctcgtgctcccattgggaacgtggctatttcagtgcgtatcgccacctggcgcaggagcaacccgacctggtgttttttctcggggactacatctacgacagttcctacgcggcggattccggcaagatcattcgcccccatggcagcggcaatgccgtcagcctgagcgactaccgcaaccgttatgccttgtacaaaaccgatccggatctacaggccctgcacgctgccgcaccgagcgtggcgacctgggacgatcacgaagtgcagaacgactacgccaaccgctggtcccaggacccgaagatcccggtggggcaatttctgcagcagcgggccgcggcctaccaggcgttttacgagcatatgccactgcgtgccagcagcttgccgaaagggccggacatgcgcatttatcgacgcatggactacggtcgattggcgcgtttccatgtgctggacggccgacagtaccgctccgaacaaccgtgcattctggcgaatggcagtcaccaggggcatatcgccgataacctctgtcatgacttgcgcgacccaggtcgcaccctgctcgggtggcaacaagaagcctggctggaccagggctttgcccagtcgacggcgcagtggaacatcattgcccaggacttgctggtggcgccgttgacccagcgcgacctgaccaaccacaaaccggggcgctggaccgatggttgggatggctacatggccaaccgttcacggatgctggcttccctcgagcgcaatcgggtcaacaatccagtgttctggggcggcgatattcattcgttctgggtgacggacttgcatgccgatggcaacaacccggattcgccggtggtcgccacggagttcgtcggtacgtcggtgacgtctgacgggccgccgtttgaggcgttcagcaagatcctgccgcttaacccccatgtgaaattctttgacagtcgtcagcgagggtatgtgtcggttgaggtgcaggagggcaggatgctcacgcacttgcgcgtgattaccgacccgcgtgatccggcggccaccgtgtcgacgctgaagtcgtttgtggtggagtcggggcgggcgggggcgatagaggtgtaagggatagacgcactttttgtggcgaatgagctgttgtggccagtggacttattgtggtgagcgggcttgttgtggcgagcgggcttgccccgcgttgggctgcgtagcagccccaaaacctgccttgaggtttatctgaaataacgcggcgttccgatcagggccgcttcgcagcccaacgcggggcaagcccgctcgccacaagggtgagtgcggctggttcaagcgatttcgtagcgtaccgacaacgcgccctttttctccgacaacgccaggatggtgacctggcccagttcacccaaggtctgcacatgagtgcccccacaggcatacgcaggcaattcgccaaagccgacctggcgggtgccgtcttccaggttcatatggcgagggtagtctgcggcgatccattggttgacctgttgctggatcgtctcggcttccatggctcgcgccgcgtcaccacgtataaaggtgatcttgccttcgcccggccagtgatgagccttgatcggcatccagcccaggctctcgcccacgttgccgatcaagtgcccggcggaatgcagccgggtatgcaacgcccggcgctgttcatcgacccgcgcgatgacgggacccggctccagcgggcggtcgatgtagtgcaccacgcgatcggcctcttggataacgcgcagcacagtgctctcgccgagccagccggtatcgaagggttgcccgccgccctgtggatgaaaaatcgtcgactgcaggatgaccgcgaactggtcctcatggggcgtgcaactcagcacctccagttcggcagtcaggtggtcgtgggtgaaaaacaggcgttcggtcatgatctacatccgcatcagggttctgcgggcagtataaatagtgcgcggatgggtgataatccgctcagttatcaatggacctgtgcaccatgagcatcaatctaccgttgccgctgctgggcgagatggcgattttcgtcaaagtggtggaaaccggcagcttctcccaagccgcccggcaactgggcgcttcaccgtcctcggtgagccgcagcatctcgcgtctggaaaaggccctggccacgcgcttgttgcaacgcaccacgcgcaaattacgcctgagcgaaggtggtgaagaggtgttcaagcgctgccaggagatggtcaacgcggcacgttcggtcatggagatcagcggacagttcacccacgaagccgaagggctggtgcgggtcagcgtgcccaaggccgtggggcggtttgtggtgcacccgcatatgccggagttccttcggcgttatcccaaggtggatgtgcagttgatcctggaggatcggcaggtggacctgatcgatgacaacgtcgacttgagcatccgcatcaccgacagcccgccgccggggctggtcggccggcagttattgcctatcgagcatttgttgtgcgcgacgccgcagtacctggccgagcatggagtgccgggccatccccatgatctgttggaacacagttgtatctacctgggggaaacgccaggggactcgcgctggaaattccgccaggcgggcaaggcggtgacagtggcggtgcgcggccggtatgcagcgaaccacaccggcgtgcggctggatgcagtgttgcaggatgtggggattggcagcctgccgtactttacggcgcgccatgcgctggaggaggggcggttggtgcaggtgttgccggcgtgggactttatcgcgtcctatcatggcgaggcgtggttgctgcattcgcccacgcgctatctgccgccgaagttgcgggtgtttattgattatctagtggcgtgcatggcgaaggagccgacattgcgacggcccattccggatcgctgatcagtgcttgctctggtcgtcgggcatggccagcagctgtttttcctggttccagtcgaacggttcgtcattctgttcggcttcaaaacggcgctcttccagggcctggtacaggtccagttcttcatcgggcatgaagtgcaggcagtcaccgccaaagaaccacagcaggtcgcgtggcaccaggtgggcgatctgtgggtagcgcaggatgacctggctcatcaggtcctggcccaggtactggctttcgatcgggtcgatcggcagcagggcgcgcagttcgtcgaaacgctccaggaacagggagtggctttcctcgggcacctgttcggcttcgccgacggcaaccaggatgctgcgcaagtggtcgagcaagacgagatgatcggcaacgacgttggacacgagataagtcctctaaagcaaaaacgggcgcgagagtatatagctcggtgccctgcctcacaaatacgattcattttgacgagtggctgttgttgtcaggcaaggcgccgcgacgactcatagctcggctatggggaggagcggcaacgcagcgtggcgacaacagacgccgtcaaaatggatcagtatttgtgaggcagggcactttgcccgcatttatatgaccgctcgcctcagcggactttaccctcagcctgggtcagctcttccttgctgaagtcatccacgtcgatcaccttgcgccgcgccgcttcggcgtcacgcagggtctgcgcttcagccggttgcagcacgccggcgtgcagtgccgcatcaatggcatgctcgccggcagcaggtttgacctggccactcttgagcgcggtgtgcagtttcttttgcagcggatggctggcgcccagcaggtcgtaggcatgttgcagggcacccaccgggtcttccgccgattgcgggcggtagcagccggccagcaattcttccagggtcgggtcgcctttggcgcggccgatcacggcggcgacttcggcgtccagcgcatcggacgggccggtatggcgacgcccgaacgggaacacgatcacccgcagcaggcaacccagcaccttgttcgggaagttgctcagcagctcatccagtgcgcgctccgattcgcccaggctttcttccatggcccaggcgaacagcggttccaggtgatccggcgaatccaggtcgtggtaacgcttgagtgcggccgatgccaggtacatatggctcagtacatcacccaggcgtgccgacaggcgttcacgacgtttcaactcgccacccagcagcatcatgctcaggtcggccaacagcgcgaacgcggccgcctggcggttgagtgcgcggaagtaaccctggctcaaacgattgcccggtgccttctcgaaatgcccaacaccgaggttcagcaccagggtgctggcggcgttgctcacggcaaaaccgatgtgttgcatcagcaggctgtcgaattccttcagcgcctggtcatggtcttcgcgaccggccagggccatttccttgagcacgaacgggtggcagcggatcgcgccctggccgaagatcatcaggttgcgcgacaggatattcgcgccttccacggtgatgaagatcggcgcgccttgccagttgcggcccaggtagttgttggggcccatgatgatgcccttgccaccgtgcacgtccatggcgtggctgatgcactcgcggccgcgctcggtgaggtggtacttgaggatcgccgacagcaccgagggtttttcccccaggtccacggcattcgcggtaagcatgcgcgcgctgtccatcagccaggcgttgccgccgatgcgggcgagggcctcctggatgccttcgaaggccgacagtggcacgttgaattgctcacgcacctgggcgtactggccggtgaccaggctggtgaacttggctgcgccggtgccgaccgccggcagggaaatcgaacggcccacagagaggcagttcatcagcatcatccagcccttgccgagcatttcctggccgccgatcaggaattccaggggaatgaacacgtccttgccggagttgggaccgttcatgaacgcggcgcccaggggcaggtggcggcggccgatttccacaccgggggtgtcggtggggatcagcgccaggctgatgcccaggtcttcttcgtcacccagcaggtggtccgggtcatgggccttgaaggccagcccgagcagggtcgcgaccgggccgagggtgatgtagcgtttttcccagttcaggcgtaggccgagggtttcctggccttcccattcacctttgcagatcacgccagtgtcgggcatcgcgccagcatcggagccggccagcgggccagtcaacgcgaagcacgggatatcatcgccacgcgccaggcgcggcaggtaatggttgcgttgttcttcggtgccgtagtgcagcagcagctcggccgggccgagggagttgggcaccatcacggtggaggccaggtcgccgctgcgggtggcgagcttcatcgcgacctgggagtgggcgtaggcagagaagcccttgccgccgtattccttgggaatgatcagggcgaagaaaccgtgggtcttgatgtgttcccaggcggcgggcggcaggtccatggcctggccgatttcccagtcgctgaccatggcgcagagttcttcggtggggccgtcgatgaaggcctgttcttcttcggtcagttggaccttgggataggccagcaacttgtcccagtcagggcgaccgctgaacagctcgccgtcccaccacacggtgccggcgtcgatggcatcgcgctcggtttcggacatcggcggcaggactttctggaaccaattgaacagtggcttggtgaagtattggcggcgcaggtcaggcaacagcaggggcgcggccaccacggcgatcaacacccagaagatcagcaacagccaacccggtgcgtggctccaggcgcccatcgccagcaggtagacggcgaccacgcccagggcgggcaggggggcgacgcggcggtgtgcgaggtaggcaatgctgaccaccagcaccagtatccacaacaacagcatattcaatcctccgtgaaaccaggggcgaaaccaccagggagcttagtcggcatccgaacaagcggggtgattagggtgtaacgagatttggccgattcgtcgttatcgccgtggcagacctgtcgttaaactccaggcttccttcggagataaagctcatggatacgtacctgagtcccagccgcttcatcgatagtgaccaccctgcggtggtggagttcgccgaaaaacatcgcggaacccacgcggctccaagtgaccaggcagtcagtctttactacgccgtgcgtgagacaattcgctacaacccctacaccttcagccgtgatccagacaccttgagtgccagtttcgcgttgagcaccggcgaaagctattgcgtgcccaaggccaccttgctcgcggcctgtgcccggcactgcggcatcccggcgcgcatcggcctggcggatgtacgcaatcatttgtcgacgccgcgcctgatcgccttgctcaagagcgatgtgttcgccatgcacggttacaccgagctttacctgaaccatcgctgggtcaaggccacgcccgcattcaaccagcagctgtgcgatctcttcgatgtgccgccgctggacttcgatggcattcatgacagcgtctttcatgcgttcaaccgccagggcctgcgctcaatggagtatgtggtcgaccatgggcaatttcccgacgtgcccgaggcgtttttcttcgcgcatatccagcagtgttacccccacctgtttgccgaggacatgccgcccctgctgggtgatatgcagagcgatttgagccgcgcgtgaaccggcgtatgctgctgccttcatctagccatgttcatcaacaataaaggcgcggtcatgctgaaaatctggggtcgtaaaaattcatcaaacgtcaggaaggcactgtggtgcgccgaggaactcggcctggactatgaagcaattgatgcgggcggggcttttggcgtggtcgacacgccccagtaccgggcgctgaaccccaacggtcgggtgccgatgatcgaagatggtgactttgtgctgtgggagtccaacaccatcgtgcgctacctctgcgccaagcacgcctccagctggtacccgagcgacctgaaggcccgcgccaacgcggaaaagtggatggactggaccacctccaccttcgccgaaccgttcaagatcgtgttctggggcgtgttgcgcaccccggcggaaaaacagaactgggacaacatccacgccggtcgccaggcctgcatcgatgtgctcaaaaccgttgatgaagccctggccacgcagccgtatctgtcgggcagcgagatcggcatgggcgatatccccttgggcagctttatctacgcctggtttgaaatgcccatcgaacggcctgcaatgccccatctggaggcctggtaccagcgcctgcaacaacgcccggcctaccgcaaagcggtcatgaccgcgttgacttaatacccactattaatacgggtgactgtacttgtgcggcgcgggcaagcaccatgcttgtcatgcgccgccgttgaactacctgggctgcgccctcatctactctttctattcccttctttggtgcgtattccgatatgagttccgctctgtccatccggcagctaaccaaaacctacggcaacggtttccaggccctgagtggtatcgatctggacgttgccgaaggtgacttcttcgccttgctcggccccaacggtgccggcaaatccaccaccatcggtatcctctccaccctggtcaacaagaccagcggctcggtgaatatcttcggccatgacctggacaaatccccggcggcgctcaagcgttccatcggcgtggtgcctcaggaattcaacttcaaccagttcgaaaagaccttcgacatcgtggtgacccaggcgggctactacggcatcccggcgaaaatcgccaaggaacgtgccgagcagtacctgacccagctgggcctgtgggacaagcgcgatgtgccttcgcgttcactctctggtggcatgaagcgtcgcctgatgatcgcccgcgcgctggtgcatgaaccacgcctgctgatcctcgatgagcccaccgcgggcgtggacatcgagctgcgccgctcgatgtggaccttcctcaccgagctgaacgagaagggcatcaccatcatcctcaccacccactacctggaagaggctgagcaactgtgccgcaacatcggcatcatcgaccacggcaccatcgtcgagaacaccagcatgcgcaacctgctgggccagttgcatgtggaaaccttcctgctggacttgaagaacaacctgtcggcgccgccgcaattgctcggctacccgagccgcctggtggacagccataccctggaagtgcaggtggacaaggccatgggcatcaccgcgctgttcacccagttggcgactcagaacattgaagtgctgagcctgcgcaataaaaccaatcgccttgaggagctgttcgtgtccctggtggagaaaaatctgtcgaaggtggcggtatgagttccgaactgcaacccaacctcgtcgcgctgcaaaccatcgtctaccgcgaagtgaagcgctttacccggatctggccgcagaccctgctgccgccggcgatcaccatggttctgtacttcgtgatcttcggtaacctgatcggccggcagatcggcgacatgggtggtttcacttacatggagtacatcgtgccgggcctgatcatgatgtcggtgatcaccaactcctacggcaacgtggtctcgagttttttcggcagcaagttccagcgttccatcgaggaactgatggtgtcgccggtgtcgccccataccatcctgatcggctacaccctgggcggtgtactgcgtggtctgatggtgggcgtgatcgtgacgctgctgtcgctgttcttcacccacctgcaggtgcatcaccttggggtcaccattttggtggtggtactgacggcgacgatcttctcgctgctgggctttatcaacgcggtgtttgcacgcaacttcgatgatatttcgatcatcccgaccttcgtgctcacgccgctgacctacctgggcggggtgttctactccatcaccttgctgccgccgttctggcagaccgtgtcgctggccaacccggtgctgcacatggttaacgccttccgctacggcattttgggtgtgtcggatatcaagatcagcgtggcgatcacgttcatgttggtggcgaccgtggtgctgtacatcggttgtgcgcgtttgctggtgagtgggcgtgggatgcgtacctgactcaacgggtgtacgcgggcaaaaatgtgggaggggcggtgcgacgactcgacttgcccccgatagcgttctgtcagtcattcatgcactgactgatccactgctatcgggggcaagccccctcccacatttgtattggcgtaacgtcaggaattgagtgccagttcgatcagcccgtgcagctcttccaccgtcagtggcgcggtcgagaacagaatgcgaaacaccgtcggcgctgcgatcaggttgatcagatggtccacgctcggtggcatctcgtccggatagcgatcgacaatcgcctgaaactgcccgctcagaatgctcacgcaataccccggcgtgatcatgcactgcaggtcgcgcatcatgttgcggcccggttccgaactcatttcatccaggtattgctcggcccaggcctgcaggtcgccacgcaggctgccggtgttggccggctcgctgtcggggcgcatgcgcgccagcgccacgtccgccaatagcacggacagatcgccccagcgccggtaaatggtggagggcgtgacgcccgcacgcgccgcaatcatcggcacggtaacgctggagcgctcatgggcttccagcagttcgcgcacagcgttgtgcactgattcttggacccgggcactgcggccccccgggcgaaggccttctttaatcgccatgctggtgaccttaacacaaagaatttgctttaagcgctggccggtagcacactctgcaaaagcaaaatattagctttagcggagcgtgcgtatgtccagtcctgtttcccatcgttccagcctggtgttccttgcggtcactttgctgacgtttctcgcggcctccagtgcgccaacgccgttgtaccacctgtatcaggagggcctgcatttttcggcaggcatgctcacgatgatcttcggggtctatgccttgagcctgctggcggcgctgttgaccgtcggctcattgtcggaccacctggggcgcaagccggtgatttttgctgcgctgcttctgaatatgttggcgatgttgctgtttatcaatgaaggcagcgtggcctggttgattgccgcccgtaccctgcaagggtttgccaccggcatggccactgccgtgctgggtgcagcattgctcgacaccgaccgccagcaaggcccactggtcaacagcgtggcaccgcttttgggcatggcctgcggggcgatgggcagcagtctgctggtggagttcgcgccattgccgacccagttgatctactggacgctgctggccttgatgctgttgcaggccctctacgtatggcgtttgccggagacagtgagccgcatccccggcgcactggcgtcgctgcgcccgacgttgcacgtaccgccccaggcgcgccgggcgttgtggctgtcgttgccggtggatatcgccgtctgggcaatgggcgggttctatttatcccttgcgccatcgttggtgcgtgcggccaccggctccacctccaacctgatcggtggcggcctggtggccgtgctgaccctgagcggcgcgctgatgatctttaccctgcgcaatcgtgcggccgacaaggtgctgcgtctgggcgccggcttgctcgccatcggcgtgacgctgatcctcaccgccgtgcacagcgccagcctgccactgttcttcatcgccacccttatcgccggcagcggctttggtgcgggctttctcggcgccttgcgcagtgtggtgccactggccttgccccatgaacgtgccgggctgatgtcggcgttctatgtgctgagctacctggcgttctgcttgccttcattgctggcgggcaacctgattcgcagctttggcctgatcgccaccaccgacggctacggcgcagtcctcatcctgctggccctcggtgcgttggttgcgttgctgctgcaggattcggcgcgggtgagggcgacgaccggcggctgatgggtaataatcggtgcccgtattcgcctgatcgagattcaagtatgaagatcatccgcagcaaggacttcaccggcagtcgcgcttgggaggcgctggatattgccaacatgaatggcatcaccacgcgcctgcactggaccgaccagccgtaccgctggcacatcaatgacggtgaagaggtgtttgtggtgctggatggtcgcgtgcagatgcactaccgcgacaatggcttcgaacaggtggcggagctggaggtcggcgacatcttctacgccagtgtcggtaccgagcacgtggcccatccccaaggcccggcgcgcattctggtgatcgaatgcgaaggcagcgtttgacgctatatcggcaaaacagataacagttagagatattacccgttatatagatattcgatcaggttctatgatggcctcaacctcatacgagaaagaggagcgtcatcatgccctgctcgaataccctcagctacaaacccttcagtcacctggcccgtccacgggaagtgattcgccagttcacccccaactggtttgccgcgaccatgggcaccggcgtgctggcgctggccctggcgcaactgccggtcaacctgccaggtttgcacgccatcgccgaagcgctgtggttttttaccatcggcctgtttgtgttgttcagcgtgctgtatgcggcccgttgggtgatgttcttccacgaggcgcggcggatcttcgggcactccacggtgtcgatgttcttcggcaccatccccatgggccttgcgacgattctcaatggcttgctgctgttcgggttgccgcgttggggcagcgatgtgataccgctggccgaggccttgtggtggctggacgtggccatggccctggcctgtggtgtgctcatcccgttcatgatgttcacccgccaggaacacagcatcgaccagatgaccgccgtgtggctgttgcccgtggtcgccgccgaagtcgccgccgccagcggtggcctgctggcaccgcacctggcagacgcgcattcgcaactggtgatgctggtgaccagctacgtgctgtgggcgttttcgctgccggtggcgttcagcatcctgaccatcctgatgctgcgcatggcgttgcacaaactgccccacgccaatatggccgcgtcgagctggctggccctggggcctatcggcaccggtgcactgggcatgttgctgctgggcggcgatgcgccggcgatcttcgcggccaatggcttgccgggcgtgggtgacatggccaacggcctggggctggtggccggtatcacgctgtggggcttcggcctgtggtggatgctgatcgccgtgttgatcaccttgcgctacttgcgcgcgggcatcccgttcaacctgggctggtggggcttcacctttccgttgggggtgtatgcgctggccactttgaagttggcgagcctgttgcacctgggtttcttcagcgtattcggcagtgtgttggtggtggcgttggcgctgatgtggctgatcgttgccaggcgcacggtgcagggcgcctataaaggtgagctttttgtttcgccatgcattgcgggactagggaataagtaagcggagttaggtaaagtcgtggcctgataactattaggccacgcaggaacacggacgatgagccacccctcgcaattcaccttgctgcgcacacggcgtttcctgccgtttttcatcacccagttgctgggcgcgttcaacgacaacatcttcaagcaatcgctgatcctcgccattctctacaagctcaccatcgacggcgaccgttccatctgggtcaacctctgtgccttgctgtttatcctgccattctttctgttctcggcgctggccgggcagtttggcgagaaattcaacaaggacgcgttgatccgcgcgatcaagatcggcgagatcgtgatcatggcggtgggtgccaccggcttcctgaccaaccatctggaattgatgctgctggcactgtttgccatgggcacccactcggcgctgttcgggccggtgaagtattcgatcatgccccaggccctgcatgaagatgagctggtgggcggcaacggcctggtggaaatgggcacgttcctggcgatcctggccggcaccattggcgccgggatcatgatgtcgtccacccattacgcgccggtggtggccgtggcgattgttggcgtggcggtgttgggttacctggccagtcgcagtattccgcgggcggcggcgtcgaccccggggctgcgcctgaactggaatatcttcagcgagtcctgggccaccctgcgcctgggcctggggcagacgccggccgtgtcgcgttccattgtcggtaactcgtggttctggtttgtcggtgcgatctacctcacgcagatcccggcctacgccaaggaatggttgtacggcgacgagaccgtggtgacgttgatcctcaccgtgttctcggtcggcatcgcactgggctcgatgctttgcgaaaagctgtccgggcgcaaggtggaaatcggcctggtgccgttcggttcattcggcctgaccgtattcggcctgttgctgtggtggcactccggcggcttcccacagaacgtgcaggccaacgactggctcgccgtgctcagctatggccaggcctggtgggtgttgttggatatccttggcctgggtgtcttcggcggcttctatatcgtgccgctgtatgcgttgatccagtcgcgcaccgccgagaacgaacgtgcgcgcgtcatcgcggccaacaacattctcaatgcgctgttcatggtggtctcggcgatcgtatcgatcctgctgctgagcgtggccaagctgtcgattcccgagctgttcctggtggtgtcgttgctcaacgtcgcggtcaacgcctacatcttcaagatcgtccccgagttcaccatgcgtttcatgatctggctgctcagccattccatgtaccgtgtggagcaccgcaacctggaggcgattccggatgaaggcgcggcgttgctggtgtgcaaccatgtgtcgtttgtcgatgcgctgttgatcggcggcgcggtgcgtcggccgattcgctttgtcacgtactacaagatctaccgcttgccggtgctcaactttatcttccgtaccgccggggcgattccgattgcggggcgtcacgaagatattcagatctatgaaaaggccttcacacgcattgcgcagtacctgaaggaaggggaattggtgtgcatcttccccgaaggcaagttgaccgccgatggcgagatgaacgaattccgcggtggcgtgacgcgcattctggaagagacggcggtgccggtgattccgatggcgttgcaggggttgtgggggagtttcttcagccgcgatccgaacaaggggttctttcatcggatctggtcgcgggtggtgttggtggcgggtggcccggtggaggagccgacgcctgcgaggttgcaggaggtggtagctgggttgcgggggagtgtcaggtagttttgggtttggctgtactggcctcatcgggggcaagccccctcccacattttgactgtgttcacaaatcaaaggtgggagggggcttgctcccgatgacggtagtggctcaggtgctgatcttgaggccaatcagcccacagatgatcaacgccacactcgtcagccggaacaacgccatggactcgccaaacaggataatccccgcaatcacggtgcccacagcccccacgccggtccagatcgcataggcggtgcccagcggcagttccttcatggccagccccagcagaccgaggctgatggccatggcagcaatcgtcaaggcggtgggcagcggcttgctgaaaccgtcggtgtacttcaggccgacggcccagccgacttcgaataacccggcaaaaaacagaatgatccaggacatgatgacctcctaacgataggtggggtcgtccccggattaggcgcttgaagcgtcgcgaggtcgtccccgcgaagctcggtagagtgccgaaaagtacccggctgatcaagtttgcggcgtgttctccagggcgcgacggtcttccttctcgctcatgcggcgaaagtaggtcgacagcaatgccccggaaatattgtgccagacgctgaacagtgcactcggcaccgccgccaacggtgaaaagtgcgcactggccagcgcggcacccagcccggagttctgcatgcccacttccaacgccagcgacttgcgctgtgccaaaggcagcttgaacacgcggccggtgaagtagcccagcaggtagccgaaactgttgtgcagcatcaccacggccatgatcaacaggcccgattcggcgatcttcgcctgactggcggcaaccaccgccgcgacgataatcacgatgctcaccaccgacaccagtggcaatacatccaccgcatggcggacccgatcaccgagcacgcgttgcgccagtacgccgagcacgatcggcaacagcaccacctgcaggatcgaccagaacaactccatgaacgacaccggcagccaggccgatgccagcagccagatcagcgccggggtgagcagtggggcgaggagggtggtgacggcggcgatggccaccgacaacgccaggtcaccgcgggccagccaggtcatcacgttggacgacgtgccgctcgggcagcaaccgaccaggatcacgccgacggcaatttccggcggcaggtggaaggcctggcacagcagccacgccacacccggcatgatcacaaagtgcgcgaccacgcccagggccacgcgccagggatggcgggcgacctcggcgaagtcgtcgagtttgagggtcagccccatgccgaacatcaccaggcccagcaggggcacgatggcgcttttcaggccgatgaaccagcccggttccaggaaggcgacgacggcgaaaatcaacacccaataggcgaaggtgttgccgacgaagcggctcaaggcggcgagtgcgcgcatggggaggtcctttgttgttggattcgatcaaatgtgggagggggcttgcccccgattgcagtctgtcagtcaaaggtgttttaactgacagaacgctatcgggggcaagccccctcccacattttgatgtcacatggcttagatgccctgcggggtttcttcgccaccgagtgcttcaaccagcgccgggatgaaatcgccgaacgtcagcatcatcagggtgaagctcgcgtccagttggcccagggcttcttcaccgccgtcctgttccgcctggtcttgcagcaggtcttcgaacttcaggcgcttgaccgtcatcttgtcgtcgagcatgaaggacagcttgtcctgccaggccagggacagttgggtcacaactttgccggtggtcaggtgcagctggatctcttcgccggtcaggtcctggcgcttgcagcgcacgatgccgccgtcttcgtgggtgtcgcgcagttcgcattcgtcgaggacgaagaagtcatcggccggcttctgggtggtgacccagtcggtcatgatcgcggttggcgcggtttttaccgtgagcgggcgaaccggcagggtgccgatcacttcacgcagggtcgacagcaggtcttcggcgcgtttcgggctggcggagttgaccaggatcagcccctgtttcggcgcgatggcagcgaaggtcgacgaacgacggataaaggcgcggggcaggaacgcctggatgatttcatccttgatctggtcgcgttccttcttgtagaccttgcgcatttgctcggcctcgatctcttcgactttctctttaagtgcgtcacgcaccacgctgcccggcaggatgcgttcttccttgcgcgcggcgatcagcaggaagtcaccgctgacgtgaaccaggggagcgtcttcacctttaccaaacggcgcgacgaaaccataagtggtcaactcctggctggcacaagggcgcgccagcttggtggccatggccgcttccaacgcctcggcatcaacaggcagatcttgggtcaggcgatagataagcaggttcttgaaccacatggggtgagtctctcctttatacaaaggggggcattattctcttgataacgtcccaggccaaccctgcctaagccattggaagctatcaaaaaaaagatttaagaaagtgcttgccagacttaaggtcgctccgtagaattcgcgccacaccgaaacgaagggtgattagctcagctgggagagcgtctgccttacaagcagaatgtcggcggttcgatcccgtcatcacccaccattcgcttcatgtgttacgcgcagcggtagttcagtcggttagaataccggcctgtcacgccgggggtcgcgggttcgagtcccgtccgctgcgccatattcggtcacctggaacactgaacgccaggtaaccacaggaagcccgctcatcgagcgggctttttgctgtccagggtttgtaaaaccgaaaaaaacgccgccgatcatttccgatgatcggcggcgttttttattgggtaatcagaaatcccagcgggtgctgaccatgaagttgcctgcgccaggtcggcggcattctggcggtagcccagtttgcgtcgcagcttggtgagcagccagccatgatgctcgctgtagagctgggtaatttcccgttggaatggcggttcacccacagacataggcgtggctcaggcgttattgagaatagtttttaattgtgcggtctagccgccggtaaacgcaatagactcgcgtttgaggacacagaagcccgtttttgctgggttttgtcattggcgagaaaatatttcaaataaagtgcatttaaatcaagacattgcggatttttggtgtatgatgccgcccacaccgaaagtgaagggtgattagctcagctgggagagcgtctgccttacaagcagaatgtcggcggttcgatcccgtcatcacccaccattcgcttcaagtgttatgcgcagcggtagttcagtcggttagaataccggcctgtcacgccgggggtcgcgggttcgagtcccgtccgctgcgccatattcggtcacctggaacgctgaacgccaggtcgccctaagaagcccgctcattgagcgggctttttttcgtccgcgatttgacctcccttgccttgacgttgtgcactgcctcttcgccctgaactgtgctggtgcgtcatgacgtgagggaatacccccatgcacattggtcgattgcaccccttgccgcttaaacgtttatctatagccacgcgaagacttccaggcgagtcatcggcagcaggacgctgcggtgcccgctctccaacacaaaaaatagtctgcaaggggaatggctctagatgaaatatccactgcgtccgttggtgttctggccaactttcctgatcctgctggcggcggtgatcgccagctacgttgacctgaatgcgttcctggcgatcagcaaacagctcaacaacctgatcctgaaaaacttttcctggctgttcagcgccggctcgtttgccatggtcgtgctgaccgccatcgtctacttctccgcgctgggcaaggtgcgtatcggcggtgaagacgcgcaaccgttgctgagtaaatggcgctggttcatggtggcactgtgcaccaccctcgcggtaggcgtgctgttctggaccaccgccgaaccgctctaccacctgtacggcccgcccaccagcttgccaatcgaggccggcagcgcggcggcgaagagcttcgccatgtcgacgatgttcctgcactggaccatcaccccctacgcgatctacctggtgccctcgctggtgtttgccctggtgttctacaaccgccgcagcaatttttccatcggcgccatgcttgaaccgttgctcggcgaagcacgggtccggcgctatgccgggctgatcgacaccctggcgatgttcgccctggtcgctggtatggcctcgtccctgggcaccggcgcgctgaccctggctggtggcctggcccagtacatcggcggtgaaaccacgccgttccgcctggccatcatcattgcaatcatcgtcatcacctttgtcgcctcggccgccagtggcctgcaaaaaggcattgtgatgctgtcttcgttcaatacctggatcatgctggccctggggctgttcgtgctgttgtgcgggccgaccttgtacatgttcagcctcggcgtcgaatccctcggcatctacctcgacaccttcttcagccgcagcctgttcaccggcgctgccagtggcgacacctggccgcacagttggacggtgttctactggtcggtgtggtttgcctgggcgccggtgagtgcgctgttcctcggcaagatcggccggggctataccgtgcgcgaattcatccacatcaacatgctctacccggcgttgttcacggccgtgtggatctgcattttctccggcaccagcctgtatttcgatgcgctgggcgacggcagcctcaaccgtgtgctcaacgagcagggcgtggagcacgtgctgtaccagatgttccagcaattgccggccagcggcctgatgatcgcgttcctgctgttcgtggcgttcatctcctttgtcaccgcggcagactccagcaccgacgtgatcgccaacctgtgcagcaagggcgtgactgccgattccgatctcgacggcaacccgctgttgaagattgtctggggcctgatcatcggcacggtgtcgtgggtgatggtcgcgtttgtcggcgtggacggggtgaagatgctctctaacctcggcggtttgccgggcatgatcctggtgttgctggccagtacctcactgatcttctggttgaaaaaccccgcattgctggatgtgaaacgccttcagcggacacctgagacggaactgcgtggcgccagcccgctgccggatttcgcccgctgatcgattgaaccgctgttggagttactgatggaaatcgtcactgagtttacttacaccgtgcgcgagatcgagcactgcctgatccctttgaaggacggcacccaactggccgcccgcatctggctgccgcaagtcgccgacccgcagaccttcccggcgatcctggaatacctgccgtaccgcaagcgcgatggcaccgccgtgcgtgatgcgctgacccacccgtggatggcggggcaaggctatgtgtgcgtgcgcgtcgacatgcgtggcaatggtgaatcccagggcctgatggccgatgaatacctgttgcaggaacaggaggacgccctcgaagtgatcgactggctgtgccggcagccatggtgcgacggcaatgtcggcatgatgggcatctcctggggaggcttcaacggcctgcaagtcgcggcacgccagcccgaggcgctgaaagcgatcatcacgctgtgttccaccgatgaccgctttgccgatgacatccactacaagggcggcaacctgctgatggagaactttggttgggccgccaccatgctcaacttcagcgcggcggtgcctgaccctttgctggtcggcgatgactggaaagatctctggcaacaacgcctggacgccatgccgttgctcgccgaaacctggctgcagcaccagacccgcgatgactactggcgccatggctcggtgtgcgaggactatgcgcagatcaaggccgccgtgtatgcggtcggcggttggggcgacgcctaccgcaataccgtctcgcgcttgatggaaaacctgccagggccgaagaaggccatgatcggcccgtggattcacaaatacccgcacttcgccgtgcccaatccagccatcggctttctgcaggaggccaagcgttggtgggatcactggctcaaaggtgtggataacggcgtgatggatgacgcggcgtgcaccttttacctacaggatattctgcccccgaggggcagttatgccgaacggccgggcatctgggtacagaccgccggctggccggacccacaggtgcaatggactgatttcagcctgggcgaacatggcctgactcctggggcacagcccttggtcacaccgcgtagcatttgctcgccgctgaccacgggcctgcaccagggcgaatactgcgccatctggtttggccccgatggcccgacggatcagcgccgcgatgatgcccactcgctgtgcttcgattcccaagcgctgaccgagccgttggcgttgttgggcgatgcccgtctcacgctgcgcctggcgagtgacacggcctgcggccaattggtcgccaggctgaatgccgtggcaccggacgggcaggtgacgcagatcagttatggcgtgctcaatctcacgctgcgtgaagacttctcttgcgtaacacctgtagtcccgggggaaccgatggaggtacatctaaacctcgaccacatcggcctgcgcttgccggccggttaccgcctgcgtctggccctgagcaccgccagtttcccgttgctgtggccaagccgcgagctgacaaccctgaccttgctggcgaccctgcaaagcctgcaattgccggtgttcaccggcgctgcggtggactgcccgttcgaggcgccgcaatcggcgacgccagtggcgatggaagtcctacgcgccgctgcgccgaaacgcaccctgatcgaagatgtgggcagtggcgaagtctgcgtgaagatcgaagacgacctgggtgcggtgcgttttaccgatcacggcttgtcggtcgaccagcgttgcaccgagcaataccgcaccttgccttgggacccgctgtcgacgcgggcggatatcgaatggcactaccgcgtcggccgtgaccagtgggccgtggaggtggacagccacttgagcgtgcatgccgatgccgagtggttctacatcgaagcggagcagacagcctgggaaaacggccagttggaacatcgtcggcaatggagcaagcgcgtggcgagggtcgcgctgtaagcaggcaactggcaggatgcttgccatcgtgatcgctgcgggcctggggcaacccgggctcgtcattgccaatggaactgctcatgtcgcgtcgaaacgtcgatcttccaccgctcaactgcttgcagacgttcgaagcggctgcccgccatttgagctttacccaggcggctaatgaactgaacctgacccagagcgcggtcagccgtcaggtcaagcgcctcgaagaggacttggcccgcccattgttttatcgcctggcccagggcctgagcctgacgcccgccggtgtgcgttacttccgcaccatccagcgcctgctgcgcgagttggaccgcgagtccgccgagttgcgccggcgtggcgccgaccgccagttgaccctggccagcacgcccactatcagcacgatctggctcgccggcctgttgccacaattccagcgcgaacacccggacctggatatccgcatcctgtgcagcgaaagccccagccatctggacgtcagtgaatatgacctgggcctgttctatcacctggatgaactggccgcgccccacggcctcgagctctcgccggtgttcgacagcgagcaggtcatcaccgtgtgcagcccggcctacctcgaacaccacggcccgattcgcgatatacaccatttgctgcacgctcacaccttgctgatcgtggaggatcactaccacgattggctgacctgggccgactggttcaccgacgccggtgccgactattacaccccgcgccacgcgttgcggaccaacagctatcaactgctgatgcagtcggcggtgatggggcacggcatcgcactgggctggaagagtctgttggaggacgacctggcttccgggcgcctgcaaatggccttgccccataccatgcacagccgcggccgcctgcatctgatgcaaccccaccaccgcaacccaccgtcggccgcgcgcagttttcgccaatggttactggccaagaccgccgcggcggagtcagctggctgaaggtcaacgctggccggtttttttctttcggttctgccgcgtcgccaagtgctcgaaacaaaaagacgcggtgccgaacaccgcaatcagggtgagtacgagcatgccgagggttgagctttccacggtgttttcctacgggtgatggagtaggtcttcacggtagaggcggggagagagtggctcaatagacccgacgcaatccttacgccgccgggtccattgttacgcactttttacggggcgttgcggctgtggcggtaatcgctgaccgcttcatacaccgccttgcgcaagcggttgatgccgccgacagggcgatgttccgctacgccgaaccaggggttgaacgactggttgtcgcacgccaggttctgctcgggggtatcgaagtcctgcgccgggatacgcaccttggccacggtttcgtagggcgcatcgctttccttccactcgatgctggtgtcttcgatcggcatgaatttctgcgggttctgccgctggatctgcagcacgaaacacgcaggcacgcgatcggtggacaactgctggctcaaggcgctgcgcagaaaattcggcaggtcctggttctgtttgggcagtgcatactccgggcaactctgcgggtctggggccacgcggaacttggcgttggccgtgccgaacttgtagggcgagaccgaaaagtaggtggtctgtgtcggactcgccggtgccggcgccagggtcgccagggcgatgaacaagtgacgcacctgccaggtgcgcgggtcgaccttggggaagaacgccaggactttcttgccatccgcctgggcgccgatgttctgtgcgtactccgccacatcactgacaaagaagttcgggtggctgaacatcacgaagtcctgttcggtgcgggtctgctggtcggccagcagttgcttgcccggcacgtccaacagcttgagggccatgccccgtgcatcgcggatgctgtcgaactgcgggtacgcgttgccgttggacagccgcatcagcgcctgccaggtcttgcccggctcggcgaacacgccctggcgcagcgccggatcgaggtcggccattacgctgacttcggccttcacgcagccgtgggccttggcgtgggcgtcgcgcaggtaacgcgtgccttcgcggtgttggtcgacgatgcgcaccgccgtctggatgattccttgggtcatcgccgcttcgccgggcggaatctgttcgtttggcgacaccggcccgctgtgctgccaggcataccaggcggtggcacccagccagccgagcaggccgaggcccaccagccaaagcaaggtcttgcccagaaacgcaccgatgcgcagccacaggcgggcgagcagggaaggtcggtcgtagggggatcgaatcatcatggcagttgttgctccagcgggccgcccagcactttgaggtattccagcagcgcccagcgttcctgcggtagcaggccacggccgatcacgcccttgccacgactgccggcacggaattcatggccgctgttgtggttgccggtgattttggtatcgaacaggaacgcattcttgaacgccgccgtctcgaaaccgagatgacgcgggtcgtagttaaaggtgcctttatagaaggtggtgctgcgctcatcctggggcgagagtaactgatagatcgtcggcaccgagccgttgtgcaggaacggcggcgtagcccacacgccggcgagcggccgtgccttgtaggcgcgcagctcgcgcacgccgatgggcaagccgtatccatccaggcgcggacgctcggccggggtcacgccggcggcacggtaggcgtgctcttcgacaaaggcggtgacgtaggcgaggcccttggccacggacatttttttcaggtccagcggttcggtcggcgtcgggtgcagctcgacgttgagtttggccagttccgccgggtcccattgcagggcgctgaggtcgtagcgctggtcggcaatgttgctggcggtgccagggtcagtgccgatgtagtccaccggcagcattttgagcgcctgcaccgggcggccgttttcctgggtgacactgggcacatggcagccggcgcagttttcggtgaacagtgcacggccctgggcggcgaggggcttgtcgatggcgccgaacaggtcctcgggccaggtcggcggcttgaggcgttgcagggtttcttcgatcaggttgaggtcacgcacgcggacgctggacgggtaacgcgcatcgccctggagcggctggccggcggcatcgaaaaagctcagcgtggcgccgacacccagggcctcaccgatattgcgcgccatgggttgctgggccgagccgttccattgcacccagtcgaaggtccagatatcccacaactgcgggtagtccaccgacgcgttggcgacgcgataattgtccggggaaatcgcatcgccaaagctggcgttggcgatacggccaaaggcgtcggtgcggcccgggccttcttcggtgggatagaggccgcgatgagtgtcgttccaggccactttgaggaactggttcagcgattgcttgaagtcctggcgcagttgtttgtgctcggcgtcgtagcgatcaccgagcacttggcgggcaaaacgctcgaacttccacgggttgtagtaggtggcggcgaggctggcgaccaacgcctggccgaaactgccgccgcgcagggtcggaacgctggagggcagtacatgctgggccgaaccgccgtcgatgcgcagggcctggcctttgaagtgcagctcgccggtatggcaggcggcgcaggtgatatccaggtattcaacgttgctgccggcgtttttatgccgggcgaaacccactggcaagttgccggggttctgcgttgtgggcacctgcttggggtcgaccaggaaaccgaagcgtgccaggtagtcgggcgtggcaaaacgtcgctcggaaaacggcagttcgagggcggtgaaccagtcgtagtgcaggccttttacttgcgtgccctggggcgtgaagtaataggtctggcggtcggtggcactccattggtcctggtagtgcacctgctccacaggcacgtagtccggcagcttggggttgatggtgtaatagagcaccacgcccagcaccagggccagcagggtgaatatcaggagtaaaacacgggtaaaaatgcgcaagatggctatccttgtctcggccttgtcgagttgtcgcgttgttatgccactacgccacaggggcggcaagtggccatgagcctggtagtaggcggtcccacgatccgtcgcgggcctgcatcatgaatgaaaatgcttttaaacacgtgaacttatcggaagtttcctgctcacatgccggtagccattggtcgtggccgcctgataagctcgcgactttattcgaatgcccttttggcgcatgaacaaggaaatagcatgaaacagcatcggttggcggcggcggtggccctggttagcctggtacttgcgggttgtgattcgcagaccagcgtagagctgaaaaccccggcgcagaaagcttcctacggtatcggcctgaacatgggcaagagccttgcccaagaaggcatggatgacctggactccaaagctgtagcccagggcatcgaagatgccgttggcaagaaagagcagaagctcaaagacgacgaactggttgaagcgtttgccgcactgcagaagcgtgctgaagaacgcatgaccaagatgagcgaagagtcggcagccgccggcaagaaattcctcgaagacaacgccaagaaggacggcgtcgtcaccaccgcttccggtctgcagtacaagatcgtgaagaaggccgatggcgcccagcccaagccaaccgacgtggtgactgttcactacaccggcaagctcaccaacggcaccacctttgacagctccgtggatcgcggcagcccgattgacctgccggtcagcggtgtgatcccgggttgggtcgaaggcctgcaactgatgcacgtgggcgagaaggtcgagttgtacattccttccgacctggcctacggcgcacagagcccgagcccggcgattccagccaactccgtgctggtcttcgacctggagctgctggccatcaaggacccagccaaggctgacgcgcctgctgcaccagccgccaagaagtaatcggcgcctgaacacacaacgccccgtctcgacggggcgttgttgtttctggggccagcaggcacctgaatgtgggagggggcttgcccccgattgcggtagatcagtcacttatgctgtggctgaaccattgccatcgggggcaagccccctcccacattagagcttggcgaattcaaacgaacgtctgcagccggttacagtctgatataagactcgagtacgggtagccgcacatcaacgccaagtcaatgaaatcttgggttttttttcagtgcgcaaaaaacgcccgatctgactgcaagccttgtactacgtggctttcagcccggaaaataggctctgttcacaaggttatccacaatttgtgtggataaccttttatgtcgcctggaactggagtgacgaatgaaaccacccttcaatttcacccgtttcctgcccatggccgcacgtctcctgggtcgcgggcgcttgccgacgctgttgtttgcggtcgccgccaaaggctcgagccaaggcaaccgcctgggcaagctcaaggatgatctcaagttgctccaggccctgtgcctggcttactggcgcggtgagtaccgggccatcagccccaaggcgctgatctcggtggtggcggggctgatgtatttcctcagcccgattgatgcgatccccgactttatcccggtgttcggcatgctcgatgacattgctgtgctggcatgggtcatgaagaccctggacggtgaactgagcgcgtttcgcgcctggcgagaggcccagcgcccggaaaagctcgccgtggttgagcgcctgcctgcgacgccctcgctgctggcccaggaaaacccgcaaaaaaacccatgacttggctatcccctgcgacctttgtggctgttaggattacactcctaaggaaagagcttacttagtaagtgcagttatcctacggggcagtcatggatattcagataatttcacgtaatggcgaacccgaatatgcggtgttgccatgggatcagtaccaggcgctgctaaaagctgccggtcagcaacagactacgctacctccttcctcatcgactgcccaagccgcccctgcacaggacctgcgcccgctcgccgacctgcgcggcttgcgcgaagccaagggcctggcgatcgagaccctggcccgcaccgtgggcatcagcccgtcatatcttggattgattgaaagtggtgaacgccagccggatgccgcgatccgccgcagcctggcctgggaattgggcgttgcaggttggagggatgaatcttgagcctacgtatcagccgtcaacactgggatggattactcaacgaactggaccaggcgcgccgccagcgccatttgctgacttaccgtgcgctgctggagcgcctgcaatttcccaccccggccatgcagaccctggccgccgccttggaacacctggcggcgctggacgccaaggccgagcagccattgcgcagctcgctggtgatcagccagggtgccagccgtttgccgcgtaccggtttcttcgagtgtgtggagcgcctggggcgtttcagcgggccgtccgatggcgtggccgccgcctcctggcacgcgtcggaagtggtgcgggtgtttgaatacgagtatcccgagtccgccgaggcctaaagcgcctgggagagtgcgtccatgctgtcgatcacatggatgctgtagccggccatatccttggcatggtgcttggcctgcgacgccaactccgccaactggctggcatcgagttgtccacaggcctgtggatataaatgcaccacgccgatggacagcgacagcagtgcaaactcctggcgcacgccctggcggttcaacgccacgaaacagccggcctccagatgctcggcgcggtagaagcgccggcattgggtatggaagtcatccagcagttggttgagccgcttgcgccagtcctgcgggccgagcaccagcaaaaagtcatcgccgccgatatgcccgacaaagtcgcggctgggatcgacgcggtcgttcaggcactgcgccaggcacagcaacacctcatcgccacgcccatagccgtagatatcgttgaacggcttgaagctgtcgatatccacgtaacagatcaccgactcgcgctgttgttgcagcaggcgtgtgaggcactgctggatcggcacgttgccgggcagcagggtcagtggattggcgtagcgcgcctgctggatcttcagctcggtgatcagcttgagcacatcgatcacccggcccaggcccaggtaatcgccattgagggtgatgatgaaatcttcttcgatgcgttgccgcgcacggctggtgagcaggcggctgacctgttgcagcgactggctcaactccaccgcgaggaagtcggtgctcatcaagcggctgatgggcttgcgcgcaaacaggtcggtggcgaacggcttgagcagcgcatccgacagcgaatgccggtgcacgataccgaccgggtggccacggccgtccagcactgccagggagttgaggttggcctggcggcggaacgcttcgagcacctgggcagtggcggtgtcctggtccactgccggctgttcgctgagcagggcgctgaggtcgctgccttcctcgttcagcgccacgttggcgctgtcgggcttgggcagcatcagccgcgcttcctgcggcggttgctcctgtggacggcacagcaggtagccttggaccaggtctacgcccatctctgtcagcaccgccaactcttcgggcaactcgatgccttcggcgatcacctgggcgcgtgacgccttggcgatctgcaggatggagccgacaaactcgcgcttgagcgcatcctgatggatgccgtcgataaagtgtcggtcgatcttcacgtaatccgggcgcagctccgaccacaagcgcaggctggaatagccggcaccgaggtcatccagggcaatcgagaaccccatgttgcggtagtggtgcagggcggtttgcaacaggtcgatatcgttggtgggggtttgttcggtgagctcgatcaccacctggctcggtggaatgccgtagtcgtgcagcagttgcagggtgcgccccggttggtgcgcggtttccatcagcgattgcggcgagacgttgaggaacagcttgcccggcagcttctgctcgctgaagcgtcgacacgcgctttcgcggcaggccatttccagttcgctgaggcgtccggcctggccggccacggagaacaaggcgacgggagagtgcagcgggctgttggacgggccgcggctgagggcttcgtagccgagaatacgccgttcagacaggcaaatgatcggttggaacaggctgtgcaaactgccttgagccaggatagagcccagtgcattcagctgttcggtcatggtcatggcgatctcgatcgaaaaaaaaggaccgcaggcttgaaacctgcggtccttcatttcacgacagaatgatgtctatatgatgacactccagggagcgatcacattaaatcgccatcatttactgcttggccacctgcttgctgatcttcaggtagtccagcaggatccggccggtctcggccaggtaagcgtcgtcttccggcttggttttttccgcttcggccggcagcgcgtcttcgtcttctttcttcagctccttgagtggatcctcacccttggccttgcggcggatgttttccagtacgagttgcttgttttcgatgtcggcgtgctgcgcgcggcggtccacttcgttgaggctgacggttttttcttccatcagcttcttggccagggccagcttgtcgcggatgaacacgaactcggcatccttggcggagcgggtgtcgtggtcagctttcaactgtgccaggaacggtttgaacggatccgacgccggcttgatcgcagggcggatggtgtcccacggcatggcttccggcagggcgctttcgccgatttccttggtgtcgatgatcgacgggaaatcgatgtccggcagtacgccctggtgctgggtgctctgtccggaaacccggtagaacttggccagggtcagtttcagctcgccatggttcagcggctggatggtctgcacggtgcccttgccgaaggtctggccaccgatgatcaaggcgcggtggtagtcctgcatggcaccggcaaaaatctccgaagccgaggccgagaggcggttgaccagcaaggccatcgggcctttgtagaaggcgcccgggttctcgtcttccagcacgtcgacacggccgtcagcgttgcggaccaacacggtcgggcctttgtcgataaacaggctggtcagctcggtcgcttcctgcagggagccgccgccgttgttgcgcaggtcgatgaccacgccgtcgactttttccttctgcagttcggtgaggattttcttcacgtcgcgggtggtggacttgtagtccgggtcgccggcacggaaggccttgaagtccaggtagaaggccgggatttcaatcacgcccagcttgtagtccttgccatcctgcttgaggttgaggactttcttctgcacggcctggtcttcgagcttcaccgcttcacgggtgatggacacgatcttgctggtctggtcgttcggtgcattggtgtgcggaatcacttccaggcgcaccacgctgcctttcggcccacggatcagcttgaccacttcgtccaggcgccagccgaccacgtcgaccatctctttgtcgccctgggccacgccgatgatcttgtcggccggagcgacctgcttggtcttgtcggccgggcctgccggtaccaggcgcacgatcttgacctggtcattgtcgctttgcaggacggcaccgatgccttccagcgacagactcatgttgatatcaaaattttctgcgttatctggcgacagataattggtgtgcgggtcgtaggacatcgcgaaggtgttgatgtaggcctggaagatatcttcggcacgggtctggtccaggcgcgccagttgattcttgtagcgcttggtcaacagctcctggatggccttgggctctttgccggcgatcttcaggcgcagcacttcgtccttgacgcgtttgcgccacaggtcgtcaagcgcggcggtgctggtcagccaaggcgcgtccttgcggtccaccagaagggtttccttctgggtgaagtcgagcttgtcgacgcctttgcccagctcactcagggcgaagtccagacgcgctttgacgcggtccaggtaacgcttgtagatggtgaacgcgggctgcaggtcgccgctcttgaggaagtcgtcgaactgggtcttccacttgtcgaactcagcgatatcgctggccaggaagtagctgcgcgacggatccagcagcttgaggtagctgtcgtagatgatcaccgagcgagcgtcgtccagcggcggcttgctgtagtgatgacgcttgagcaactcgacgacgttaaggctggcaatcacctcatcgcgatcaggttgaagattgtcccagctgttggctgcgaacgtattggtcgacatcgacgcgaagccgagaccaatgaatagagcgagggcggtgctggggaacagatgcttcatgctgattcgacgcgggggcaattgataacgcatattaggccgtctttgagggagccggttccatatggtccggtcgcataatgcaaaaagcccggcgatacagctacgggctcagtccagactcactatggaggcactgtgaaagcattgcaaggcgttgacggtcatgtggagtggttggaagaacccagtcctacttgcgatgtagggcaagttcgtattcgtgtggcggcagcgggcctcaatcgcgccgatttattacagcgggcggggctctatccgccgccgccgggtgccagccacgtgctgggtctggagtgttccggggtgatcagcgaagtgggcgccggctcgtcctggcaagtcggtgaccgggtttgcgcactgctcgccggtggcggcatggccgaggaagtggtggtggatgcgcgccacgtgctgccggtgccggaaggcctgtcgctggtcgaagcggcggcgctgcccgaggtgtacagcacggcgtggctgaatctgttccagttggcgggcctcaagcccggtgaaaaggtactgctgcatgccggcgccagcggcgtgggctcggcggcgatccagttgtgcaaggcgtttggcagtccgtgctgggtcagcgtcggctcggcagagcgcctgacctattgcgaggagctcggtgcacagggcggcgtggtgcgtaccgacggcatcgaggggttgcgggatttcgggccgttcgatgtgatcctcgacccggtcggtggcaactatgcggcgctggacctcaagctgctggccctcgatggtcgttgggtgttgatcggcttgatgggcgggcgtgacgcgcaactggacctggcccaggtactgggcaagcgcattcagttgctgggctcgaccttgcgcagccgcagtgatcagttcaaggccgacctgttcagcgacttgagccagcatgtgtggccgctgtttgttgaagggcggctgagcccgcagttggccaggacctttgcgatcaaggatgccgaagcggcgtttgccgagcttgcgaccaaccggatttccgggaagttggtgttggtgattgacgaaagcctgagctgaattgtaatgcgtttaataatgtgggagggggcttgcccccgatgacagtgnnnnnnnnnnnnnnnnnnnnnnnnnnncactgtcatcgggggcaagccccctcccacatttttgatctcggctcaatcagacccagtgatggatcggccagccggccttttcggcatgctcgcgcaacaccggatccgggttcactacctgtggatgttccaccttcagcaacaacggcaaatcattgcgcgagtccgagtagaaatacgcaccgtccagcgtttcaccttcctgctccagccactccagcaagcgggtgatcttgccttcacggtaggtcaatacaccctcggtatggccgctgtacacgccgtgcttcacttcaaggttgatgcccaacacctcatcaatgccgattcgtgccgcaatcggtgtaaccaggtgcgtgccggaggcagagatcaccaggatccggtcgccattcgcacggtggcgggcgatggtcttggtggcgtcgctgtagatcagcggttcgatcacgtcctcgacccacggctccaccaggtgttcgatttcctccggtgtgcggccgatcatcggttcgaggctgaaagccatgaagtcttccatcttcaactggccctggctgtaggcgtccatcagctcgtcgttcctgcgcatgaacgactcagggtcgacccagcccaggctgcccatttgctcgctccacagggtggcgcagtcgccgtggatcagtgtgtcgtccagatcaaaaattaccaatgccatccgtcatgctctctcaataaatcgtcgctgctcaggctacttcacacagggcgctggggtcgatggaaagtgccaggcgttgcccgtccgggtgcaggtcgtcggccgagcggttgagtacgtctaccaccagttccacgccacgggcttcgatgcggtagcggatcacgttgcccagcaggctgtggctgcgcaccagggcatccaactcaccattgcggctcagctcgatggcctccgggcgaatggcgatacggctgttgatcgggcgttgcagcaattgggtggccttgtcggcatccagcaggttgtagttgccgatgaacccggcggcgaatacgtccaccggcgcggtgtagagagtctcggcatcgccgctctgcacgatcttgccctggttcatcaggaagatccggtcggacatggtcagggcttcttcctggtcatgggtcacgaagatcgtggtcaaccccagctcgcgctggatctggcggatctgctcgcgcaggtgcttgcgaatccgtgcgtccagcgctgacagcggctcatccagcagcaacaggcgcgggcgcgtgaccagggagcgggcgagggccacgcgctggcactggccgccggacatctggtgcgggtagcggccggcgaggtccttgagttccaccagttgcagcacttcctgcacgcgcttgtggctgtcgtcggcgttgaccttctgcatgcgcaggccgaaggcgacgttctgttccacggtcatgttggggaacagcgcatagctctggaacaccatgccgatatggcgtttctgcgggctcagcgggacgatgtcctgcccatccagcaggattttgccactgtcgaccgaggtcagcccggcgatgcagcgcagcagtgtggacttgccgcacccggacgggccgagcagggtgacgaattcgcccttggcgatttcgcagttgatatcactgaacaccggggtgccggcgtagcctttctgcaggtgttggacgctgacgaagctcattggcttttgtccttgttcaagatattggcggcccaggtcagcaccagcacaaagaagaagtaggaaatcacgacggcactggtgaagtggccgctgctgttgcgcatgttgttcaggtacacctgcagggtttcgtagcgggtgcccacgaggatgttggcgaacacgaactcgccgaacaggaacgagaacgacagcaacagcgccaccatcaagcctttgcgcaagttcggcagcaccaccaggatcgccgcctgccaggtgctggcgccgagtagttgggaggcgtccatcaggtcgcgcaggttgatcgcttgcaagttgttggtgatcgcccggtacatgaacggcagcgcgacggtgaagtagcagccgatcagaatccacggcgtgcccaccatcgcaaagggcccggagccatacagttgcagcaggcccaccgacgacaccaccggtggtaccgcgaagggcagcaggatcaggatgttcatcagcgcatcgagcttgggaaagtggtaatgcaccacgaacaacagcggcaaaatcagcaccaccgacagcaccagcgcacccacgcacaccagcagcgattgcccgaaggccatcaggaagcgcgggtcgctccacagctgcacgtaccatttcaccgtgaaaccagctggcaggattgttgccgaccaactgctggcgatggagtagacgaaggtgcccaccaacggcagcaccaggattgcaaataacagccacaccaccacacggtggtagagggaggccgggccggcttcagcgcgagacatggtagctcctcttgagcagcagttgatggaccacggtgaccacggtcatcagggccaccagcaccacggccagggcgctggccaggttcgggtcaagggacacgtcaccggacaccagccccgcgatacggatcggcagtacgttgaagttgccggtggtcagcgcatataccgtggcgtaggccccaagggcgttggccagcaggatcacgaatgtaccgagcagggccggggtgagcaccggcaggccgatatgccgccagaactgccagccgttcgcgcccagcagcgacgccgactcgcgccagtcttcgcgcagcgcatcgaatgccgggtacagcagcagtacaccgaggggaatctggaagtaggtgtagagaatgatcaacccggtcttcgaatacaggttgaagtcctgaatgatccccgcctgcttgagcatgatcgtaatgctgccgttgaaacccagcaaaatgatgaaggcgaacgccagaggcacaccggcaaagttgctggtcatgttggcgaaggcggtgacgaagttgcgcagcggcgagtccacccggcgcagggagtaactgccgagggtggcgatgatgatgccgaacacgctggagtagaagctgatctccaggctgaactggatcgcttgcaggtagaacttcgagctgaagatgcgcgtgaagttttccaggccccagccagcctcttcggtttgcagactgttgatcagtacccacaccagcggggcgatttcgaacacgataaagaacagcgcgaaaggtaccaggcacagcagcgctagccatttgcctcggatcatttcaacagctcccggcatacaggtttgtcgtggggtacgcccagcagctcacagacggtgccgcacagctcggtctgtttcggtgcggcgcgggtgtccaggctgaacgcagcgcccagcacaaacagcggcacttcgcgttcttcggggagcaggccattgtgggagcggtcgttgttcatgccgtggtcggcggtgaccagcacctggtagccggcatcgagccaggtgtgcaggtagtcggccaggatgatatcggccgagcgtgcgctgttgcggtactgcggagtgtcgaggccgtgcttgtggccggcgtcgtcgatgttcatcggatgcaccaccaggaagttcggcgcgtgcctgaggcgcaggctttcggcgtcggcgaacaggtgggagtccgggtagtggtcattccagtagaaatgcccgtgctggatcgccagcgccgtgtcgtcggtatgacggtcgcgggcggcgaggaagggcgtgcggttatacaactcgctgacccagtgataagccgccgctgccgtggtcaggccggcgtcggtggcgtaatggaaaatgctgcgctggttggacaggcgcgagacgttgttgtggacgataccgctctggattgggggtacgccggtgaggatgcattcatacagcgggcgggacagggcgggcagttcacattccagtttgtacagggctgcgcgtcctgcgccgacataggcctgcaagtgccccatggcgtgccgcgcaacctcgaagttcaggccgtcgagcacgacaaggatgacattgtgcttcatggggggaggcgctccgcaacgatggacttgactcaatattcctggtgcatctgggttcaagtgtgggagggggcttgcccccgatagcggcgtgtcagtttgaatacctgtcactgatccaccgccatcgggggcaagccccctcccacattggatctccagtggagtccagtgtgaggtggcaggcttacttcatctctacgatgacttgctcgttccacaactgaggcagcttcttggacgtggcttcccaggcatcggcatccttgatcggctgcgggttggccttggtgtactgctcgcccggaatcaggttcttggcgatctcggccggcagtttcaggtcggtttcagcgcggatcggacgcgcattgcctttggccaggttgagttggccggcgtcgctgaagatgtactcgcgggtcagtttggcggcgttcgggtgtttggcgtatttgttgatgatggtggtgtagccggatttcaccgagccgtccgatgggatcagcaccacgtagtcatccgggttggccatcttggccttgtagctcaggccgttgaagtcccagaccacgcccacttcgacttcgcctttttccatggtggcgatggtcgggttggacagcgagagacggccttgctgggcgatcttggtgaagaattgcaggccaggggcgatgttcttttcgtcacctttattggcaatggcggccgccagcacgccattggccgcttgcgccgcggtgctcacgtcgccaatggaaactttgtatttgcctttttgcaggtcagcccagctggtgggcacgtcagaaccgtgcagcagtttcttgttgacgataaacgcgatggtgccggtgtaggccaaggcccagtgaccgtccttgtccttggcccaatccgggacctgggcccaggtggacggtttgtacggcagggtgacgtcctgcttcaccgcaatcggaccgaacgccgcgcccacgtcgccgatatcggcactggcgttgtctttctcagccttgaacttggcgatttcctgggccgagctcatgtcggtgtcaatgtgcttgaggccgtaggtcttggccaggtcttcccaggtgcctttccagttggcccagtcatcgggcatgccgacgctgttgacagcgccttctgccttggcggcagcttccagggtttttagatcggtatcagcggccatggcggcggtgcacatggcaatggtcgagcctaacagtgatgccaggaaaagctgtttcatccgaagctcctttgggcgttttcaacgcggcggttgtttctgcggtgttgttggtctaggtcagagcaatacctgagccaatctaggctcgatggatgacagtttcatgtcgatgtcgtttttaaatcgctgatgtcgctcgtcgcagagtgagcgtagaccatgctcaagcgcccgcagggattggacttggccgatgtattgcagggtgtgctgcgacggatgcacacggactgtcatctgtcggtcatctgtaatacctaggctggcactcaaccgtgcaagcccctttacgcagcggtttgtgcaccttgtcggtgctggtctagtccagataggtaacgttgatgcgtgatgaggcaatcaaggcggtgacatccatcggcctggcgctgcaagagcagatcgaccacggcctgttgccgcctgccagcaaactgcccgccgagcgtaagctcagcgagttgttcggtaccactcggattacggtgcgggaagccttgttacaactggaagcccagggccagatctatcgcgaggaacggcgcggctggtttgtctcgccgccacggctggcctacaacctgatgcagcgcagtcactttcacgcgatggtcagcgaccaggggcgggtggcttccaccgaggtcatctccgcgcggctgcaaccggcgtcggcggcggtgtgtgcgtggctgcagttgccggcgctgtcgagcgtgatccagatttgccgtggccggcgaatcgatgggcgcctggtgttgtatgtggagcactacctgaacccgcagtattttcctgggatcctggcgtgtgatctgaatcagtcgatgaccgagttgtatgcgcgcaagtacgacctgcactacgggcgggtgcgtttcgagatcgtgccgacgtcactgccggtggaggccgccgcggcgttgcgcgtgtcggtgggcagcccgggcttgcgtatcgcccgggtcaactatgaccagcatcagcggttgatcgactgcgacctggagttctggcggcatgatgcgattcatgttggtgtggatgttatgggatcagcgccttgatcacctggtccacattggtttccagctccgccaccggttccgcaccgtccacattcagcaccagcagcttggcgccacttgcagtcaccgccgccgtcaccgcctcgctcggctggcgatgatgcagcaccaccgccacatcgttgtccttcagctcggccgtgagcttctgtaacgcctcgggcgtccagtcggtatccggccgcgcatcggtgctgagcacttccaggttcaaactgctgatcagataagcaaagtgatcactcaggctgaccacgctcaggttgtccgccttggccaggcgcgcttcgctgtcggcggtgagtttgagcaggcgctgcttgagggcggcaaggttggcgtcgattttcggcttggcatccggggccaggcggcccaggtcggcggccagtacatcggccatgcgccccatattgttgctcgactgccacggctggctgttcaggccatcggcaacgcccggctgtacggcgatgccgggcaagccaccatctaccgggcgggcggcgtcgacttcgacgatgcggatattgctgcgccgcgccaccgggtacagcgggtcatcggcccacaatgagcgcaggccgatggcggcgtcggcgtccagcgccaatttgctcagggccggcgcgccacgcccggtgaagtaggacacctggcgtgaacccggcaagttggccggcgcggcgcgctcaagctgtacgttggtgcctttgagcagcacctcggccaggccgtaggtaatcggcagcgaagcgaggatcttcacctgttttaccgaagtggccttgctcagtgcggcgtggcccaatccctgatggatcttgagaggcttgggctctaacccgtcgaccgccagggccgaagtgctgatgaaacatgtgatggccagagccaatggacgaagtacaggatgcattatccaagattccctttgaggctgggcaccgtgccgcgcgcgatggcggccagggcgaaggcgataccggcgaccaggatgatggcggcgccggacggcacgggcaggtcgaagatgatcggcagcaggatcccgcacagggtgctgactgtggcaatggcgaccgagacccagaagaagcccttgagcgactggctcaacagccgcgccgcagccgccggaatcaccaacagcgcccccaccaggatcgcaccgatgaccttgaccgccgcgacggtgatcagcgtcaccaggatcacgaacaggtagtccagggttttcacggcgacgccgcgtaccgccgccagttgcggattgaaactggccagcatgatgcggttgtacagcggcagcgccagggccatcaccagcgaaccgacaatcgccagcaccagcaggtcgttgccgttgaccgtcaataccgagccaaacagcacgttctcgaggatgtgcacgttgatcttgcccgccaggatcagcaacaggctcgcccccaatgccagtgacactgacaggaacaccccgatcagggtgtccggcgccaggcccgtgcggttgcgcaggtagttgagcaggatgccgaacagcaggcagtagccgaacagcgcgccatacggcccggtgtagggctcacccagcagaatccccaccgccacgccggtcaacgcagcgtggccaacggcttcggagaaaaacgcgaagcgcttgaccaccaccagcgtgcccaggccacctagcaccgggccgatcagcaaaccggcgagcagggcattgaccacaaaaccgtaggccagcgcctccggcagataaccggaagaggcccagccctggaccatcaagcgaaaggcttcataactcattgcgccgggctccgagggtgggtggagaacagggtcagcaggcgctccggggtcagtgcctccttgggcgtggcgtcgaacagcacgcggcggttcaggccggtgacgcggtcggccaggcggcccacggcttccaggtcatgctcgatccacagcacggtgatcccggccaggcgccagtcattgagcaggcgctcgaacacctggataccggcttcgtcgagggccgacatcggctcatccagcaccagcaggtgcggcgccgggatcagcccctgggccagcagcacacgctggcgttcaccgccggacagcgcgcccatgcgccgcttgcgtttgtcctgcatgccgacgcgctccagcgcatccccgatcgcaccggcgtaatgcttggacaaaccgaggaaagccgggcgccgttggcacatggcggccatgaaatcatccacggtcatcggcaagccccggtcgaactccagggcctggggcacatacccgatggtgccgggcgcggccggccaatgcaggctcagccgaccctgatggggcgtttgcccgagcagggtcttgatcagcgagcttttaccgccgccgttggggccgaccagcgcatggatgctgcccggctgtacctggaaactcacggtatcgaggatcacggtgcgacccagggtcagcgatacctggtcgaactcgagcgtcgggccgacgctgaccgccttcagctgttgcgccgccgtcatgccccggactcctgaatcgcccggaccaccgtattgaggttgccggtcatttccacttcgtacttctcggcgctgtattcgccgtaggaaatatgtgacagcgggtacagcttgaccccggactcacgctgaatggtgtcgacgtaggtggacgggaagtccatctccgagaagatcaccttcacgtccagggcgcgcagttcgtcgatggttttcttcaactggctggggctgggctcgatgccatgggccggttcgaccacggcggtgacttccaggccgaactcgcgcaacaggtagtcgtaggccgcgtgcacggtggccacgcgcaggtccgggttgggcgcgctggtcaacttggccagggcatcggcgcgcatctggcgcaggcgcttgccgtaggcgcgggcgttctgggtgtaggtcttggcgttgtccgggtcgagcttgcccagttcacgggcgatgttgttgacctgggcaatcgatgcgctgatcgacaggaaggtatgcgggttgaccactttgcccgcgccgcgtgcggcgttgccggtggcggccagcaacggcacattggcgttggcttcgatcaccgggatgtccggacgctcgctggtggcgatcatgcggtcggcgaaatcgtcatggccgacgccgttgagcacgatcacgtccagggtgccgatgcgcttgatgtcttcggcgcgtggctcgtaggcatgggggttgaagccggccggaatcagcggcaccacctcggccttgtcgccgacgatattggccacgtagctgtaataagggtgcagggtgatgccgattcgcaggcgtttggcggcttcggcattggccagaggggcgagcatcaggctgaacaggccaaccagcaacaggcgcaacaggggcgatgaaatagacatgggcaatcggtcttctcgttcagtgacggtgctggcgggtgacgccggcatcgaattgcgcaaccacctgctgccagccggctgcgatcagcgcctggtcagagaggtcggagggagcggcgaggttggcctggcgattgagccagatgtccggctcgacaccgtgcacgcgcatcagcagtgaaccgctggtcgccggcgcctggctcacacccaggtaggccgaaggctccagcaattgccagcggtgatcgccacggctgaccgaactggcatcctgggcaaagggagcgaagccttcttcggccagttgcgccgggctgggcagcgcgctttgctcctgctgcaacagttggatctcatccagggtcacccgcaggtcggcataaatgccttgctcggcggcgctcaggtcgcggcgggcgtccaattggtggctcggtattgccgccacctcctgggattcaccgtgcagcgcgaccaccgagccggccaccgcgaggatgatcaggcacaacagcagcacgtagagggtttcgtgaccggcaccggcggggcgtacaacctgtgtggtactcattgcggctggatatccgcttggtcgatttccaccacatggccgggaccggcatcaaacagcacgtagaactcggcggacggtttcttgaaggtcagggtcgagtcctgaccgagtttgccgggcaccaggatggtttcgtcatagccgatcacgtccagggtcacgccgggtgcaccactgccgtcggagaagccgcctttgcattggatctgctcgccggggatctccttgcactcgcacatcgggttgtgggcgagcgcgacggtgctgaagccggcacctatcaacaggacgccacaggcgcgggtcaatcgcatcaaattcatggtttaactccttgcttgttcagccaggcaatcgtggcaggcgaggcctggctcaacgggatggaaccctggtgcatgctgccgtcccagccttccatggtcacccacagttcggcgtcgacgggcgtgcgttccgggatcggcaggccggcgcccatgcggtacggcgtgccgaagaagatcaccccggcagcccgcaggctgcgcggcttgccgatgcgcaggtaggtggccttgacctggtcggcacagctgtcgcacagggcggcgttgaagaacttcatcgggccggccgggtcgggacgcgggccttcattgcgaaactcggcaagcttcaggctccacgggccgacctgcacgtcgccagccactcgctcgccgataccggtgtcgccgcgaaacagtgccgcatcggcaaagtacttgggcatgaagcccagcggcaccagcaacagcagcacgttgatatggaaacgccatttcagccagaacgcccgcagaggcgatggctttgccgcagcgaccttgctcatgagttggcctccgaggtttctgcctgccgggcggggagggaaaccggtttgtgttgagccttggcttcacgcttgaaggcattgagggtggccaaagcggtgcgcttggtccagatcagcaggccgctcaacaccatcatgctcatgatcaggccgaagaatgcccagatcagcttgatccagatcccgccgaagtcgccggtgtgcagcgggcgcatggattcggtgacgaactccagcttcgagcggtcggacagcaggtgcgccgctgccacttcaccgtcgtaggggttgatctgtgcggtctggaacatcaacgggtaccagccccgcccgccgatctgcaggtggctgtaggcattcaggggcaggctgatgaaactcgcctccaggccaggaatgcgctgggtggcgatcttgatcgcctcgtccaccggaatcatgggggccggcacgccaggcgcggacatcggcactttctcccgggcaatcacggggatgaccggttcagtggaaatcgaaatctggttgtcgcccaaaatcgcgcggatcaggaaccagatgccggtgaccgagatcaccgcaatgaaccagatcgaccagatcccgctcaagcggtggaagtccccccagaaaatccgcgcgccgtggcggattcgcagggtcgggcgcaggaagcctttccagaaccgcttgtacaccaccagcccggtgaccagcgacgccagcagcgggatgccgagtgccgacaccaggtaccagccccagctgtagccgttggtgaagggcaccagccaccagccatgcagggcgcgggtgaattgctggaagttgaaggacgggctgatgccctggatcgccccggtgtacgggttgacgtagacctccaccgaacgcccgtcggggtagctgaggtcgacgctcaaggcaaagtgcgactcgtcggggcggctgatcgactgcacgtacacctggggttcgtcgcgcttgatggcggcgatcacctggtcatagctcagcggttcggcatcgtccgagggcttgctcgcacggatatccgggttggccagccagacgatctcctggctgaccaccgccagggtgccagtgacgcagacaatcagtacaaagaaccagataggcaatgccagccagctatgtacgagaaaccagagtttggagcgtgacttcttcgacatgtgaatgagggtcttgatcggaggggggcaatggaggcccggaaaaggccagtcgtagcttttgctgacgcgacgggctgtatctaagttaagacggatgagaatgagaaatccctaaggcggatatgaaagaaaatgtttcaggttcacattcagggcgctttttcgccttgatcgaacacgaaacatgttccaagccatcacccaggcgccattgatggggcggggcggctgcgtaggatgggcgcataccgttgagcgagcgcctacaaaagtgagtttagaaaaatgactgcccgaaccctctacgacaaacacatcgattcccacacggtgtgccccctggatgaccagggccatgtgctgctttatatcgaccgccaggtgatcaacgaatacaccagcccccaggccttcagcggcttgcgtgaggccgggcgtaacgtgtggcgcccaggcacggcgctggccgtggtcgaccatgtgaaccccaccacgcccaagcgcatcgcggcgatgcccgacgcaggcggggcgcggcaagtgtcctacctggcggagaactgccgggacttcggcatcgagctgctggacatcctcgacaaacgccagggcatcgaacacgtgatcgccccggagcagggctttatcctgccgggcatggtgatcgccgccggtgacagccacaccaccacctacggtgccctcggcgccttcggttttggcatcggcacttcggagatcgaacacctgctggcgtcgcagacgctggtctacaagcgtctgaagacgatgcgcgtgagcgtggacggcaatctggcacccggcctgacgtccaaggatgtgatcatggcgctgatcggcaagatcggcgcttccggtgccactggctatgccatcgagttttgtggttccactatcgatgtgctgagcgtcgaggcgcgcatgaccatctgcaacatggcggtggaggcgggcgcgcggggtgcgttcatggcgccggacgaaaaagtcttcgcctacctcaagggcaagccgcgtgcaccacaaggcgagctgtgggaccaggcgctggtaggttggcgccaactgcactcggacgctgatgcggtgttcgaccaggaagtgcacctcgacgccaccactctggaacccatggtcacctggggcaccagccccgaccaggccgcgcccatcggcgcccgcgtgcccgacccgcaggatgtcagcgacctgatcctgcgccaggacatgcgccgcgcgctcaactacatgggcctggaagccggtatgccgctgagcgagatcgtcatcagccatgccttcatcggctcctgcaccaacgcccgcatcgaagacctgcgcgacgccgccagcgtggtgcgcggcaagcgcgtggctgaacacgtgcgggcgatgatcgtgccgggctccaccgaagtgcgtgaccaggccgaagcggaaggcctggcggcgatttttatcgatgccggctttgaatggcgccagtcgggttgctcgatgtgcctggccatgaacgacgacgtgctcgcccccggcgaccgctgcgcgtccagcaccaaccgcaacttcgaaggccgccagggcgcgggtgcacgcacccacctgatgagcccggcgatggtcgccgccgctgcgattaccggccgccttactgatatccgccactttggagcgcgcccatgagcctgcaacccttcaccctggtcaccggcaaggccgcgccgatgctggcggccaacatcgataccgatgtgatcatgcccaaacagtttctcaagggcatcgaccgcagcggtctggaccgcgggctgttcttcgacctgcgtttcttggcgtccggcgagcccaaccccgagttcgtgctgaaccagccggcctggcagggcgcgagtttcatggtggtcgggccgaacttcggctgcggttccagccgagaacacgcggtatggggcttgaagcagatgggcatccgcgcattgatcggcagcagctttgccggaattttctatgacaattgccagcgcaacggggtgttgttgatcaccttggacgaggcggtgttgcagcagctgggcaagaccgtcagccaggcggaccaggcgcagatcaatgtcgaccttgaagcccagcagatccatttggcggatggccaggtgatcccgttccagatcgataccctgcgcaagactgcgttgttgcagggcctggatgccatcggcagcaccttgcagcgcagtgacgagatcaaggccttcgaacgccggcacctgcaagccaacccctggctcacctgacatacttaggcctaaatgtgggagggggcttgcccccgatggcgatgggtcagtcaacttctgagtgactgacactctgcaatcgggggcaagccccctcccacatgtttatccggatcataccgcttagattgagagccccttgaagtgctcctgcaaaaactccacgcaggcccgcagctttccggaatacgccaaccgtgtcgggtacaccgcccacacgttggcgctctgggtataaccgtgcagtatctgcacgagcttgccttgctccagcagcggcttaacatcccacatcgagcgcagcagcaccccgcgcccatccaatgcccactgcaacacaatctcgccattgttcgatgacagcggcccacgcacgcgcacgctttcctgggtgccgtcgcgctccaggttccagatgccaaacgcgttatcacgctccttgagcaccaggcagtcgtgctgctccaggtcgctcaactgttgcggtgtgccgcgtcgctccagataagccggggcggcgcacagtacgcggcggttgctcaccaggcggcggccgatttgctggccagggatgtcgtcacccacgcggatctccaggtcgaagccttcgctgacgatatccaccacgcggtcgaataggtccaggcggatttccaggtccgggtattgctctgccagtaacgacagggcgggggccacatggttgcgaccgaagccgaagctgctgcacaaatgcaggtggccgcgcgggctgtcatgggcgtcggagagttcatcggagagatgctggaagtcttcgaggatgcgcacggcccagcgctgcacccgttcaccgtcttcggtcagggcgatgcgccggctggtgcgatgcaacaggcgggtggccagggtggtttcgaggatctggatgcgcttgctgacatacgccggcgacaagcccagctcatcagcggcggcagcgaagccggccttgcggatcacggtcaggaacacccgcaggtcttcgggtaggggcacggtatctttcttgttagtcatcgcaaacagggctggcggcatgagccgccagaatagcaccggttgagcgcgccttccggcacgcccaggtgttgtcgattattcggcggcgaccttggcttgagcagccgcccgagcatcgcggccgcgcttgagagcgatgggcgccattttttcgcggtccagttcaccctcccaggcggctaccaccagggcagccacggcgttgccgatgatattggtcagcgagcggcactcggccatgaaacggtcgatgccgaggatcagcaccatcgccgccaccggtacggtcggcaccaccgccaggctggcggccaatgccacgaaccctgcgccaaccactgcgcctgcacccttggacgtgagcatggccaccgccagcaaggtcaactgttgctcaagcggcagatcaatattggtggcctgggccaggaacagcaccgccagggtcatatagatgttggtgccgtccaggttgaaggtgtagccggtcggcaccacgatgcccaccacgcctttggaggcgcccaggctttcgagtttctggatcaactgcggcaacgccgattccgacgaactggtgcccagcacgatcaacagttccgacttgatgtagcccatcaacttgaaaatgctgaacccggcgtagcgggcaatgctgcccagcaccaccgccacaaagaaaaacgcggtgatatagaaggtgcccaccagcttcagcagcggcagcaacgaacccaccccgtatttgccgatggtgaacgcgatggcgccaaaggccccgatcggcgccactcggctgatgatgccaacgatgcggaagaacacctcgctggcctggttgaccacacccaccagtggccggcccttttcaccgaccattaccaggcccacaccaaacagtacggagacgaacagtaccggcaggatttcgcccttggagaacgcatcgaagaaggttgcggggatcacgtgcaacaggaatccggtgatgccttcgccatgttcggcctggccgacgaagttggcgatggccgaactgtcgagggtcttcacatcgatattgaagcccacgcccggatgcaacaggtgcgcggcgagcatgccgatcaacaaggcgatggtcgagactatttcaaagtacagcagcgccttgccgccgacccggcccacctgcttcacgtcgtgcatgctggtgatgccagacaccaccgtgcaaaagatgatcgggccgatgatcatcttgatcagcttgataaaaccgtcgccaaggggcttgaggtcgatgccgatctgcggccattgatggccgatcaacacacccaatgcgatagcgatcagcacctggatatacagggttcccagcagttttctgattgtcattgttattatctcgagacgttgttttgggcaaagcgaacccgtcgcaggccattggcagcctgcgaggcgggcggatcagttcacggggtgacgcagttgctcagcgaaggaaggtcaggacttcgcccagcagcaactcaggggcttcttcagcaatgtaatggccggccggcagggccttgccacgcacgtcagtggcgactttctgccattccttgagcggctcgaagcagcgcccgacagtgccttcggcgccccacatcaccagcaacggcaggttcaggtgattgccggcgtcgatgtccgcctggtcgtgctccaggtcgataccggcggcagcccggtagtcctcgcagatgcccgtggcggcgcccggcagtttcaggcagcgcaggtattcggcgaaggcttcctgggtgaacggcttgagcccggcgctgcgactgcccatcacgctgcgcaggtacagctccgggttgccttcgatcaaggcttccggcaacggcgccggacggatcaggaaaaaccaatgccagtaggcacgggcgaaggcttcgttggtctgtgcgtacatggacagagtgggggcaatgtccagcaggaccatgcgttgcacggcggccgggtggtccagcgccaggcggtgggccacgcgggcgccacggtcgtgggccagcaccgagaacgtgtcgaagcccagcgcctgcatcagctcgacgccgtcccgggccatttcccgtttcgagtaattggtatggtggtcattggccggtggcttgctgctgtcgccatagccgcgcaggtcggcggccaccacggtgaagtgttcagccagttgctcggcgattttgtgccagatgacgtgggtttgcggatgcccgtgcagcaggagcagaccgggacctgtaccacctttgcggtagctgatgtccacgccgttgacgtggtactggtctttatggaatccggcgaacatggaatgactcctctttgtaattgcttgcatcctggaatcacgcggcgttcggggcaagggcaaaaacgtggagggggtgttcatgaagtgtgatgcaggagcgggctggctcgctcctgcaaagggtcagccctgtttgaacatggcctcggcgcgttcgcggatctgtgcttcggtcaggtcttccttgtgggtggccaggaaccacacatggccgaatggatccttcaacgtgccggagcggtcgccgtagaactggtccttgggttcggagatcggtgtgcccccggctgcgatggcttgtttgtaccgggcgtcgacgtcatctacatacacatgtataccgacgctggtgtggccatcgcgtgggctgccgaacgcgctttcatcgcagggtgaaccgagcatgatcggtgagtcgccgatgcgcagctcggcgtggccgaccttgccgtcgggcatgtccaggcgcatggcttcgatggcgccaaaggctttcttgtagaactcgatggcttcggcggctttttcgacacccaggtagggcgtgatgctgtggaagccctcgggaataggtttaacgctcatatcgttctccttgattgtggttgtggagggacggtcttttcactataggccacgtatcgcgtggcctgcgggcagccgacgaggtgtcgggggcgcatcatgcatggggtgtcggttccaacaactgtgcccctggcccgcgttcaccgagctggtcatcctgattgcgcaacgggcacgcttccagcgacaaacacccacaaccaatacagccattgagcttgtcgcgcagcaacgtcagcttgttgatgcgctcatccaggtcttgccgccacagcgcggacaaacgctgccaatcctgggcgttgggcgtgcgcccctccggcaatgtctgcaaggcttcgccaatcgttgccagcggaatccccaggcgctgggcgatcttgatcaccaccacgcgccgcagcacgtcccgtgggtaacgccgctgattaccggcattgcgattgctcttgatcagccccttggtctcgtagaagtgcagcgcggtgaccgccacaccactgcgggcggccagttggccgacggtgagtgccttgttgagcataaaaactccagataagtgcttgaccttgacttaactagaggttttagcctgcgtgacatcgaatcgcaagattctgcctacagagaaaggggagtgttcatgcaggtatctgagaaaaatcgcggcttcactcaattgatcgagtttcagatcgagccgcagcaacaatctgccctggtgtcagccctgagccttcagagcgaacgcctggcccaaggccatggcggctttatcaatgccagtgtgcaggtcagcgatgacggacggcgggtgctcaattacctgcaatggcactcgcgtgaagacggcgaggcggccttccagtgttttgagcacggcgaggaagatttctggacattgattcgcgcccaccaggccacggccgtgaccttcggttcgttccaggtgctgcgcagtttcgagcgcagccacgacaacgcgttgcactgccggctaaatggataggtgcagcatgcgctcaccttgcacgttttcgccggggcggcgcttgttcaccgccagttcgccgatcttgatcaggcgcgtacgtgtgacgttgcggctcaggccgagcaggctggcggtgtgcacctggttgtagtggctgaaacgataggcggcccgtagcagggcatcttcgactttttcatgcagggcgccggcctgttcttcgaacagcttctggaaggcccgcgctagcaacgcctcggcactgttgtcgctgccgtgctggctgtcgtcctggcgctcgatgcgcatgttcgacaggcgcagatcgtcgcgctcgatcacgccgttacggcagatcaacagggtatggtggatcacgttttccaactcgcggatgttgcccggccaactgtagcttttaagcttgtgctcagcctcgcggctgatggtgatcgggccgtaacccaggcgctggctgtaggcttcgataaagtgccgggtcagcggcaggatatcgccggggcgctcgcgcagcgggctgagttccaggctgaccacgtcgagacggtagtagaggtcttcgcggaagtgcccggcgttgatggccttctccaattgcacgttggtcgcggccaatacgcgcacatcaatcggaatgctcttgcgcgaacccaggcgtacgacttcgcgttcctgcaggacccgcagcagtttgacctggatcgccatgggcaaatcgccgatctcgtcaaggaacaaggtgccgccgtcggcctcctcgaaccagccggccttggcgctgagggcaccggtaaaggcgcctttctcatggccgaacagttcggcctccaccagcgactcggagaacgccccgcagttgaccgctacgaacggccggttgcgccgtgcgctgaggttgtggatgtggcgtgccaccagctctttaccggtcccggtctcgccgatgatcagcacgctggcttcgctgggcgccacttgctggatgtgatcgagcagtgcctgggatttcgggtcttcgaagacctgggccgtggcgcggatcgacgtcgcgagggcaggtgagggcggtagggtcaaaagctgcatgggcacctctcttaggaatagaacgtcggaatcggcaaggagtggttcaatgcccagtcccccagttcgtggagtttgtagtccaccgggtcgtgcagggtttgcgtgcgcaggttgcgccagtgacggtccaggcgcagtgacgcatgggtggagcgcgcaccggtgacttcgaacaggcggctgcacaattccaggccctgctgggtggcggcgaccttggcggtggcgatggcaatcgccagttggccgcgctcgtgctcgctgaggttcgggcctttggcccaggcttggtcgagcaggtcggcggcacgttctaccagcaggcgcacgccttccagggcgacccagaattcgccgtagtggtgcagcacgtatgggtcctggcgcacgtcttcggctgaggatttatgccaggcgcgggtttcggtcagcgtgtagttgcgggcttcttcgaaagcaccttcggcaatgccgagaaacatgtgcgtgaaggtcagttgggcaatcaacgggcgcaggcaggcgaagggcgtgctcagcgggcccggatcgagcagcagctcggattcttcgacgcgcacacgttcgaaactggcgctgccgctgtcggtctggcgctggccgatgttgttccagtcgttgtgcaaggtgatgccgctgcgcccgctggggatcgcggcgatcagcagtttgccaccggcggtttcgtccaccgccgaggcgatcagcatttccgagtcgctggcgccggagcagaagctctttttgccggagaactcgcgccagccgctgaaatccttgaccacggtgcgcgtgtccagcgggttgagggcgttgccccagaaccagtttttgcgcgcggtctgttcgaaccagggttgccattggtccgggcgcgaaaacaggcgcacggtggcgagcatcaggtggtgaaagccgaagacatgggcgatggaactgtcgaccttggcgaattcgcgcacgatacccagggtgtcgctccagcgtgcgccgaggccaccgtattgggggggaatgctcagggccagcaggccgctctggcgcagggcgtcgcgttcggccttgggcgtgccaccgcgctcgtcgcgttcgacggcggtgagggcgaattcggcggccagcagtctggcggtctgcaagggggacggcaggacgctgtggggtttggcggtcacacggtgttcctcattgatctcaagctttggtcggcaacacatcgttggcaatcatttcgccaaacggtccagtgaggttggtgatgccgtgcccggcaaggctggcgtagggctccggcagcaacgggaacaccagctcggcgaagcgataggcttcttccaggtgcgggtagccggagaaaatgaagctctcgatccccaggtccgcatattccttgatgcgttcggccacttgttgcgggttgcccaccaacgcggtgccggccccgccacgcaccaggccgacgccggcccacaggttgggggcgatttccaggttgtcgcggcgcccgtcgtgcagggcggccatgcggcgttggccttcggaatcaaagcgcgaaaaggatttttgcgcggcggcgatggtttcgtcgctgatgtgctcgatcaacgtgtcggcggctttccaggcgtcttcttcggtctcgcgcacgatcacatgcaggcggatgccgaacttcacggtgcgcccgtggcgggcagcgcgttcacgcacatccgcaagtttttccgcgacagccgcgggtggttcgccccaggtcaggtacacgtccacctgctcggcggcgaggtcgtgggcggcgtcggaagaaccaccgaagtacagcggcgggtaaggcttctgcaccggtgggtaaagcgccttggcgttctgtacgcgcaggtgtttgccttcgaaatccaccgattcgccctgcaacacgcgacgccagatgcgtaggaattcgtcggagacttcgtagcgctcggtgtggtcgaggaagctgccgtcaccacggttttcgtcggggtcgccgccggtcaccacgttgatcagcaggcggccattggacaggcgatcgagggtcgccgccatgcgcgccgagacagtcggcgaaatgatgcccgggcgaattgccaccaggtaacgcaggcgttcggtcagcggcaccagcgctgaggcgatgacccaggagtcttcgcacgagcgtccggtaggaatcagcacgccgtggtagcccaggctgtcagccgcctgggcgacttgtttcagataattgagggtgaccggccgcgcaccttgggtggtgcccaggtaatgaccgtcgccgtgtgtgggcagaaaccagaaaacatccatgaccaatccttaagcgattttcagcagagagggggagtgcgcggcaaacaaaggcgctgcgcgttctgccgccagttgaatacgggctttcagcaattcgctggttatctggtagtcggtgaagtcggcttcggtggcgtacacaccgatcggcagggtcagggcttggaagaagctgaacagcgggcgcagttgatgatcgaggaccagcgcgtggcgttcgctgccgccggttgccgccagaagcacgggtgtattgatcagcgcattgaggccgaccaggtcgaacagatgcttgagcagtcctgggtaggagccgcgatagaccggtgcggcgacgatcagcaaatcggcctgttcgatggccaacagttgcgcttcgacttctgccggcagttcatcacgggacagcgcaccacccagcggcctggcgatatcgcccagctcgatcagggtggcctggatcggcagcaaggtcgccaactcagccagcaccgcctgggtcaacaccagggtacgggacgggcgccaggttccgccggagagggcaacgacattcaggggacgggtcatgaacagttcctttttcaacagtggttcatagcaggtggagtgcaaccgcttgagcaagagctgtaccaacgggtgcaggccttgattgacgtgggttgcaggctcactgctgaaaaatgccggtgttggctgcctggtgatttgttgattggctgttgccagggcaacagttgcgtgggcaacagtgccagggcggtgtagcacccgttatagagggttgtatttattccgtaaatgaacgtatttccatatttatagatcataaagaaatataaaaggcactgctatcgaaggtgccttggcggttgatagcaactatcaaggcaggtgatttttcaccgtgaaagggcgggagtagcctgtcttcattgactcgaaacctcctttgcagggccaccgccatgaaccgattcctcgctgtttccttattgattgtcagctcagtccttgccggatgtgcgacccatccttcgcctgaattgcgtccctacaccgcggaagaaaccaaacagttggccctggaggcattgagccgtcgtggtttgtcgtttgacgaatatcaacagcagcgtgccgcactgaccggccagccacagaaacccttcggatttgatcgccagggcgaaatgaacgccgaacgcagcgtgaccctgcatggtcgtcccagttgaatccgcgctcagcggcaaaaaagcccgaggttatccacaaggatcctcgggctttttgttttccatggggcgacttcagcctgttaagctgaatttcaggagcgttcctacgcacatttacataaagtggtccttctttaatggcatgtgatcggttaaacctgacgacctctgtcccggtccgtgcccctgagacgctgctctcgggaacctgctctgcgagtttctaacgtcatgaataaacgtccgttgtatttcgactacgccgccaccaccccggtggatgagcgggtcatccaggtgatggtcgagtgtctgggcttcaatgccaatttcggtaaccctgcgtccagttcccacgcgttcggccaggcggcccggcaaacggttgaacagtcgcgtcgccaggtggccgaactggtcggtgccaaccccgaacaaatcgtctggacctccggtgccaccgagtccaacaaccttgcgatcaagggcgtggcccaggcgcggggcgtggcgggtgggcatatcatcaccagccagatcgaacacaaggccaccctggataccgcgcgacaattgcaggaagccggtgtggccgtgacctacctggtgccggacgccgatggcttgatcagcgccgaggccgtcagcgaagccttgcgtgaggacaccttcctggtgtcgctgatgctggtgaacaacgaactgggcaccctcaacgatatccccgccatcggtgcccgcgtgcgtgaacacggcgcgttgttgcatgtggatgcggcgcagggtgcgggtaaggtggcgatcgatctggcgcagtggccggtggatctgatgtcgttttccgcgcacaaactgtatggccccaaaggtatcggcgcgttgtatgtcgggccacgggcgcagcagaaagtcctggcgcagattcacggcggcggccacgaaggtggcttgcgttccggcaccctggcgacccatcagattgccggcatgggcaccgcgttcgccttggcggcggcgtctttcgctgaagaaaaggcggtgatcgtggctctgcgccagcgcctgcttgaccagttggattcggtggctggtgtgcgcctcaatggcagcgctacacagcgtattccacataccctgagcctcacgttcagtgaaggcgaattcaacgccgctgcgttgagtgcagggatcgcgttttctgcgacctcggcctgcaattcggccagcaatgcaccgtcccatgtgctgctcgccctgggtcatgatgcacgcagcgccagccgcaccatccgcttgagcctcggccggtttaccaccgagcaggatatcgaccaggcggtacaactgatcaaggcggccctcgccagtgcaccggcgttctgggcggtctgattcatctatcgcaacacataataattattcgtggttagcaggagacacaatgagtacgcagcccttgacccatggaacggttccccagcgcctggcgcatacccgtgaactgatgagccgcgagggcattcacgccctgctggtgccgtcggccgacccgcacttgtccgagtacttgccgggttactggcaggggcggcagtggctgtcggggtttcatggctcggtgggaacgctgattgtcactgcggatttcgccggtgtgtgggccgatagccgttactgggaacaggcgaccaaggaactcaagggcagcggcatcgaattggtgaagctgcagccgggccaacccggcccgctggagtggctggccgagcaaacgccggaaggtggcgtggtggcggtggatggtgcggtcatggccgtggcttcggcgcgtaccctgggcggtaagttggcggagcgcggcgcgagcttgcgtaccgatatcgacctgctcgatgaagtctggcaagaccgtccggcattgccgaaccagccgatctatcaacacctgccaccgcaggctactgtcagccgtactgaaaaactcgcttctctgcgtgctgccttgaaagagaagggcgccgactggcatttcattgcgaccctggatgacattgcctggctgttcaacctgcgtggtggtgacgtttcgttcaacccggtgtttgtgtcctttgcgttgatcgatcaacaacaggccacgctgtttgtggcgctgagcaaagtcgacgccgaattgcgggctgtgctggggcaggatggcgtgaccctgcgcgactacagcgaggttgcggatgcattgcgcgcggtgccggcgggcgccagtttgcaggtcgacccggcgcgcgttaccgcgggtttgctggagaatctcgatgccggcgtcaagctggtcgaaggcctcaacccgaccacattggccaagtcccgcaagagcctggccgacgcggaacatatccgtcaagccatggaacaggatggcgcagcgctgtgtgaattcttcgcgtggctggacagtgcgctgggccgtgaacgcatcaccgaattgaccatcgacgaacacttgaccgctgcgcgtacccgccgccctggttatgtgtcgttgagtttcaacaccattgcggcctacaacgccaatggcgcgatgccgcattaccacgccactgaagaagaacacgcattgatcgaaggcgatggcctgctgctgatcgattcgggtggccaatacctgggcggcactacggacattacgcggatggtgccgatcggcacgccgagtgacgagcagaagcgggactgcacccgggtgctcaagggcgtgattgccttgtcccgtgcccactttccgaaagggatcctgtcgccgctgctggatgcgattgcccgcgcgccgatctgggcggaaggcgtggactacggccacggtactggccacggtgtaggctatttcctcaacgtgcatgagggcccacaagtgattgcctaccaggcggctaccgcgccgcaaacggcgatgcaagcggggatgatcacctccattgaaccgggtacttaccgtccaggccgttggggcgtgcgtatcgagaacctggtgttgaaccgcgaagcgggcaagaccgagttcggtgagtttctcaagttcgaaaccctgaccttgtgcccgatcgacacgcgctgcctgttgccatcgttgctcacggcagacgagcgtgagtggttcaacgcttaccacactgaggtgcgcaagcgtttgagcccattgctcagcggtgccgcgctggagtggttgcaggtacgcactgcggctatctgattacctgccaggcagtaacgtgccagggcgttttggccatcaagctctaactcaacgcttcgcgcacaaattccagacggtcctgaccgaagaacagctggttgcctacaaacatactgggggcaccgaacacgccgcgttgaacggcctgttcggtgttgtccttcagggcagtcttaacggtttcgtcattggccaaattcaggatttcattggcggcaaatccgtattcagtgagtacggcagccaggacggcggggtctcccaggtgacggccttcgacccaaaaggcatggaacaggcaatcaacgaagtccaggaaacgttcaggctggtgtaattggatgccggtgaccgctcgcatcaacaccagcgtattgatggggaagtgcgtgttgaaccggagcggtacgttgtagcgccgggcgtaacgcgccaggtcatcaagcatgtagcgaccctttgcaggaacggtgattggagaggcgttaccggtggccttgaacacgccgcccaataacatgggtttatacacaagctgtgtatcggttgccgtgcacaatgccggtagctgggtgtaggccaggtaggtggcggggctgcccaggtcaaagaagaattccagggttttactcatggtcgatgctcgctgcttattgttataggggcgtgcttaccagggttcattccaggggcgcaggtccagttcaaaggtccaggcatcgcgtggctggctgtggaggtgccaatagttatcggcgatatgctcagggttgaggatgccgtcctggtccttgagtgcgtatttctgcgggaagttgtcgcgaatgaagtcagtgtcaatggcgccatcgaccacgacatgggcgacatggatgttcctgggccccagctcccgcgccatgctttgcgcgagcgcccgaatgccgtgcttggccccggcgaatgcagcaaaacctgcgccgccgcgcaaccctgcggtggcgcccgtgaacaggatggtgcctcgattacgcgtgaccatccgccttgccacttcgcgtgcatttaggaagccggagaagcaggccatttcccagatcttgaaatacttgagcgcagtttcttccaggatgctgcacggcacattggcgccgatattgaatacaaaggcttcgatcgggcccagctcggtttcgatctgttcgatcagcgcgatgacgtcttcttctttacgcgcatcgcaggcaaacccatgggcttcaccgccagcggcgtgaatactctcgataaggggctgcaacttatcggcgctgcggcgggtgacacaggccacgtagccttcgcgggcaaagcgtttggcaatggcgccgccggttgcatcacccgcgcccactactaatacgatttttttgttgtgcgtcatgggacctccctcggctcgatgatcgagcaagagtttagacgccgtgtggtgaagggtagggtttgtatctggatttaataggagcagtcagagatgactgctcaggcgattacttgcagataacgatcatgctgcggctggtgtagccggcagggttgaggccgaaggggtagtccccaggctcctcggagttgtcaccggactttgcgattactcggtagcccttggcgccacaggcgttggtcgcactggtgtagcactgctcccaggaagaggacaagccggaacagttgatatgcagcccttttttgccacgtttcacttctgtcttggtggtcgcggcacaaccagcaacggccatgaccattaacagtatcaaaattcgcttcattcctatccttaatagccgccttgcaatgccagaggccggctctactcgctctcgggtgtagcgttcgcgctgtccttgtcgaagttctccatgattgacattcgtttgcggcctaaacatggcctaaatgtgcggtaaataccagagctacattcaaacagacttcaatccgaggcaaccaaaggctttggctcactgcgcatcgtcaccgtggcacctacggaggccagaatgatgcaagtgattgccagccactgagcgagcgataagtgctcgtgcaggaataacaggccggagagcgcgccgaaagccggctcgatgctcatgagggtgccgaaggtgcgggcggggaggcgcgtcagtgcgaccatttccagggtgtaaggcagggcggtggacagaatggcgacgccgatggcgatcgggattagcgcgggagtcagcaatgcgctaccagcatggacgatgccaataggcgcaacaaacaatgcggcgatcatcaccccaagggcggcggtttggaccccgttgtcattccctgctttctggccatatagaatgtagagcgcccagcacacgcctgctcccagcgcgtaggctgcccccagcaagtcgataccgccgctggcctcgcccatcgggatcaacaagagaaggccgatgatggcgagggcaatccacaggaagtcgaccgcgcgccgagaggcgtagatggccaccgcgagggggccggtgaactccagggcgaccgcaatccccaggggcacgctgcgcaatgacatatagaagagaaagttcatgccacccaacgccatcccgtagacgatgacggtgcgtaaggacttggaggtcaggttggcgcgccacgggcgtaacagcagcagcatgatcacgctggcgaaaatcaagcgcagggttgtggtgccttgtgcgccaacgatagggaacatgctcttggccagcgaggcgccggactggatggaggccatggcgatcaacagcaggccgacagggaacagtgtcgaggccaggctgcggggggaggtggtcattggggtattcgtccgaagtcatatatagagaagcaagggcgctatgatgctcaactgtttagtgttgagcaatatattgctcaactatcctttttaatgcgtcatacagggcgaattttgagcgtttccggttctttgatagaaaaagcaaattaagggttgacggcagattctggaagtctataattcgccccacttccggcgcagtcgaaacggaaaactccttggtaaacaaagagttacgcagaattcgacagcgacttgcttc

SEQ ID NO: 134 - DNA, 5092 bp, Pseudomonas nodulensis; identical to SEQ ID NO: 28

SEQ ID NO: 135 - DNA, 1558 bp, Pseudomonas nodulensis; identical to SEQ ID NO: 29

SEQ ID NO: 136 - DNA, 1364 bp, Pseudomonas nodulensis; identical to SEQ ID NO: 75

SEQ ID NO: 137 - DNA, 948 bp, Pseudomonas nodulensis; identical to SEQ ID NO: 31
